(19) United States
(12) Patent Application Publication
(10) Pub. No.: US 2016/0175359 A1
(43) Pub. Date: Jun. 23, 2016

(54) METHODS FOR CONTROLLED ACTIVATION OR ELIMINATION OF THERAPEUTIC CELLS

(71) Applicant: BELLICUM PHARMACEUTICALS, INC., Houston, TX (US)

(72) Inventors: David M. SPENCER, Houston, TX (US); Joseph Henri Bayle, Houston, TX (US); Aaron Edward Foster, Houston, TX (US); Kevin M. Slawin, Houston, TX (US); Annemarie B. Moseley, Austin, TX (US); Matthew R. Collinson-Pautz, Houston, TX (US); MyLinh Duong, Sugarland, TX (US)

(21) Appl. No.: 14/968,853

(22) Filed: Dec. 14, 2015

Related U.S. Application Data
(60) Provisional application No. 62/148,386, filed on Apr. 16, 2015.
(60) Provisional application No. 62/092,149, filed on Dec. 15, 2014.

(51) Int. Cl. A61K 35/17; C12N 5/0783; C12N 15/85; A61K 31/4545; A61K 31/436

(52) U.S. Cl. CPC A61K 35/17; A61K 31/4545; A61K 31/436; C12N 15/85; C12N 5/0636

(57) ABSTRACT

The technology relates in part to methods for controlling the activity or elimination of therapeutic cells using multimerization of proteins to manipulate individual protein-protein interactions in therapeutic cells, for example, by activating or eliminating cells used to promote engraftment, to treat diseases or condition, or to control or modulate the activity of therapeutic cells that express chimeric antigen receptors or recombinant T cell receptors.

### RELATED APPLICATIONS

[0001] Priority is claimed to U.S. Provisional Patent Application Ser. No. 62/148,386, filed Apr. 16, 2015, entitled “Methods for Controlled Activation or Elimination of Therapeutic Cells,” and to U.S. Provisional Patent Application Ser. No. 62/092,149, filed Dec. 15, 2014, entitled “Methods for Controlled Elimination of Therapeutic Cells,” which are all referred to and incorporated by reference thereof, in their entireties.

### SEQUENCE LISTING

[0002] The instant application contains a Sequence Listing which has been submitted electronically in ASCII format and is hereby incorporated by reference in its entirety. Said ASCII copy, created on Feb. 9, 2016, is named BEL-2022-UT_SL.txt and is 686,689 bytes in size.

### FIELD

[0003] The technology relates in part to methods for controlling the activity or elimination of therapeutic cells using multimerization of proteins to manipulate individual protein-protein interactions in therapeutic cells, for example, by activating or eliminating cells used to promote engraftment, to treat diseases or condition, or to control or modulate the activity of therapeutic cells that express chimeric antigen receptors or recombinant T cell receptors.

### BACKGROUND

[0004] There is an increasing use of cellular therapy in which modified or unmodified cells, such as T cells, are administered to a patient. In some examples, cells are genetically engineered to express a heterologous gene, these modified cells are then administered to patients. Heterologous genes may be used to express chimeric antigen receptors (CARs), which are artificial receptors designed to convey antigen specificity to T cells without the requirement for MHC antigen presentation. They include an antigen-specific component, a transmembrane component, and an intracellular component selected to activate the T cell and provide specific immunity. CAR-expressing T cells may be used in various therapies, including cancer therapies. These treatments are used, for example, to target tumors for elimination, and to treat cancer and blood disorders, but these therapies may have negative side effects.

[0005] In some instances of therapeutic cell-induced adverse events, there is a need for rapid and near complete elimination of the therapeutic cells. Overzealous on-target effects, such as those directed against large tumor masses, can lead to cytokine storms, associated with tumor lysis syndrome (TLS), cytokine release syndrome (CRS) or macrophage activation syndrome (MAS). As a result, there is great interest in the development of a stable, reliable “suicide gene” that can eliminate transferred T cells or stem cells in the event that they trigger serious adverse events (SAEs), or become obsolete following treatment. Yet in some instances, the need for therapy may remain, and there may be a way to reduce the negative effects, while maintaining a sufficient level of therapy.

[0006] In some instances, there is a need to increase the activity of the therapeutic cell. For example, costimulating polypeptides may be used to enhance the activation of T cells, and of CAR-expressing T cells against target antigens, which would increase the potency of adoptive immunotherapy.

[0007] Thus, there is a need for controlled activation or elimination of therapeutic cells, to rapidly enhance the activity of or to remove the possible negative effects of donor cells used in cellular therapy, while retaining part or all of the beneficial effects of the therapy.

### SUMMARY

[0008] Autologous T cells expressing chimeric antigen receptors (CARs) directed toward tumor-associated antigens (TAAs) have had a transformational effect in initial clinical trials on the treatment of certain types of leukemias (“liquid tumors”) and lymphomas with objective response (OR) rates approaching 90%. Despite their great clinical promise and the predictable accompanying enthusiasm, this success is tempered by the observed high level of on-target, off-tumor adverse events, typical of a cytokine release syndrome (CRS). To maintain the benefit of these revolutionary treatments while minimizing the risk, a tunable safety switch has been developed, in order to control the activity level of CAR-expressing T cells. An inducible costimulatory chimeric polypeptide allows for a sustained, modulated control of a chimeric antigen receptor (CAR) that is co-expressed in the cell. The ligand inducer activates the CAR-expressing cell by multimerizing the inducible chimeric signaling molecules, which, in turn, induces NF-κB and other intracellular signaling pathways, leading to the activation of the target cells, for example, a T cell, a tumor-infiltrating lymphocyte (TIL), a natural killer (NK) cell, or a natural killer T (NK-T) cell. In the absence of the ligand inducer, the T cell is quiescent, or has a basal level of activity. At the second level of control, a “dimmer” switch may allow for continued cell therapy, while reducing or eliminating significant side effects by eliminating the therapeutic cells from the subject, as needed. This dimmer switch is dependent on a second ligand inducer. In some examples, where there is a need to rapidly eliminate the therapeutic cells, an appropriate dose of the second ligand inducer is administered in order to eliminate over 90% or 95% of the therapeutic cells from the patient. This second level of control may be “tunable,” that is, the level of removal of the therapeutic cells may be controlled so that it results in partial removal of the therapeutic cells. This second level of control may include, for example, a chimeric pro-apoptotic polypeptide.

[0009] In some examples, the chimeric apoptotic polypeptide comprises a binding site for rapamycin, or a rapamycin analog (rapalog); also present in the therapeutic cell is an inducible chimeric polypeptide that, upon induction by a ligand inducer, activates the therapeutic cell; in some examples, the inducible chimeric polypeptide provides costimulatory activity to the therapeutic cell. The CAR may be present on a separate polypeptide expressed in the cell. In other examples, the CAR may be present as part of the same polypeptide as the inducible chimeric polypeptide. Using this controllable first level, the need for continued therapy, or the need to stimulate therapy, may be balanced with the need to eliminate or reduce the level of negative side effects.

[0010] In some embodiments, a rapamycin analog, or “rapalog”, is administered to the patient, which then binds to both the caspase polypeptide and the chimeric antigen receptor, thus recruiting the caspase polypeptide to the location of the CAR, and aggregating the caspase polypeptide. Upon aggregation, the caspase polypeptide induces apoptosis. The amount of rapamycin or rapamycin analog administered to the patient may vary; if the removal of a lower level of cells by apoptosis is desired in order to reduce side effects and continue CAR therapy, a lower level of rapamycin or rapalog may be administered to the patient.

[0011] At the second level of therapeutic cell elimination, selective apoptosis may be induced in cells that express a chimeric Caspase-9 polypeptide fused to a dimeric ligand binding polypeptide, such as, for example, the AP1903-binding polypeptide FKBP12v36, by administering rimiducid (AP1903). In some examples, the Caspase-9 polypeptide includes amino acid substitutions that result in a lower level of basal apoptotic activity as part of the inducible chimeric polypeptide, than the wild type Caspase-9 polypeptide.

[0012] Thus, in some embodiments, a nucleic acid is provided comprising a promoter, operably linked to
[0013] a) a first polynucleotide encoding a first chimeric polypeptide, wherein the first chimeric polypeptide comprises (i) a first multimerizing region or a second multimerizing region; (ii) a MyD88 polypeptide region or a truncated MyD88 polypeptide region lacking the TIR domain; and (iii) a CD40 cytoplasmic polypeptide region lacking the CD40 extracellular domain; and
[0014] b) a second polynucleotide encoding a second chimeric polypeptide, wherein the second chimeric polypeptide comprises (i) a pro-apoptotic polypeptide region and (ii) the first multimerizing region or the second multimerizing region, wherein: the second multimerizing region has a different amino acid sequence than the first multimerizing region; the first chimeric polypeptide comprises the first multimerizing region and the second chimeric polypeptide comprises the second multimerizing region, or the first chimeric polypeptide comprises the second multimerizing region and the second chimeric polypeptide comprises the first multimerizing region; the first multimerizing region and the second multimerizing region bind to a first ligand; the first multimerizing region binds to a second ligand; and the second ligand does not significantly bind to the second multimerizing region. In some embodiments, provided are nucleic acids that comprise a promoter, operably linked to a) a first polynucleotide encoding a first chimeric polypeptide, wherein the first chimeric polypeptide comprises (i) a first multimerizing region or a second multimerizing region; and (ii) a MyD88 polypeptide region or a truncated MyD88 polypeptide region lacking the TIR domain; and b) a second polynucleotide encoding a second chimeric polypeptide, wherein the second chimeric polypeptide comprises (i) a pro-apoptotic polypeptide region and (ii) the first multimerizing region or the second multimerizing region, wherein the second multimerizing region has a different amino acid sequence than the first multimerizing region; the first chimeric polypeptide comprises the first multimerizing region and the second chimeric polypeptide comprises the second multimerizing region, or the first chimeric polypeptide comprises the second multimerizing region and the second chimeric polypeptide comprises the first multimerizing region; the first multimerizing region and the second multimerizing region bind to a first ligand; the first multimerizing region binds to a second ligand; and the second ligand does not significantly bind to the second multimerizing region.

[0015] In some embodiments, the first ligand comprises a first portion, the first multimerizing region binds to the first portion, and the second multimerizing region does not significantly bind to the first portion. In some embodiments, the second ligand is not capable of binding to the second multimerizing region. In some embodiments, the first multimerizing region is a FKBP12 or FKBP12 variant region and the second multimerizing region is a FKBP-12-Rapamycin Binding (FRB) or FRB variant region. In some embodiments, the first ligand is rapamycin or a rapalog, and the second ligand is selected from the group consisting of AP1903, AP20187, and AP1510.

[0016] Also provided in some embodiments are nucleic acids comprising a promoter, operably linked to a) a first polynucleotide encoding a first chimeric polypeptide, wherein the first chimeric polypeptide comprises (i) a FKBP12 or FKBP12 variant region; (ii) a MyD88 polypeptide region or a truncated MyD88 polypeptide region lacking the TIR domain; and (iii) a CD40 cytoplasmic polypeptide region lacking the CD40 extracellular domain; and b) a second polynucleotide encoding a second chimeric polypeptide, wherein the second chimeric polypeptide comprises a Caspase-9 region and a FRB or FRB variant region. Also provided in some embodiments is a nucleic acid comprising a promoter, operably linked to a) a first polynucleotide encoding a first chimeric polypeptide, wherein the first chimeric polypeptide comprises (i) at least two FKBP12 or FKBP12 variant regions; (ii) a MyD88 polypeptide region or a truncated MyD88 polypeptide region lacking the TIR domain; and (iii) a CD40 cytoplasmic polypeptide region lacking the CD40 extracellular domain; and b) a second polynucleotide encoding a second chimeric polypeptide, wherein the second chimeric polypeptide comprises a Caspase-9 region and a FRB or FRB variant region.

[0017] In some embodiments, a modified cell is provided that is transduced or transfected with a nucleic acid of the present application. In some embodiments are provided modified cells, comprising a) a first polynucleotide encoding a first chimeric polypeptide, wherein the first chimeric polypeptide comprises (i) a first multimerizing region or a second multimerizing region; (ii) a MyD88 polypeptide region or a truncated MyD88 polypeptide region lacking the TIR domain; and (iii) a CD40 cytoplasmic polypeptide region lacking the CD40 extracellular domain; and b) a second polynucleotide encoding a second chimeric polypeptide, wherein the second chimeric polypeptide comprises (i) a pro-apoptotic polypeptide region and (ii) the first multimerizing region or the second multimerizing region, wherein: the second multimerizing region has a different amino acid sequence than the first multimerizing region; the first chimeric polypeptide comprises the first multimerizing region and the second chimeric polypeptide comprises the second multimerizing region, or the first chimeric polypeptide comprises the second multimerizing region and the second chimeric polypeptide comprises the first multimerizing region; the first multimerizing region and the second multimerizing region bind to a first ligand; the first multimerizing region binds to a second ligand; and the second ligand does not significantly bind to the second multimerizing region. In some embodiments, the second ligand is not capable of binding to the second multimerizing region.

[0018] In some embodiments, methods are provided of controlling survival of transplanted modified cells in a subject, comprising a) transplanting modified cells of the present application into the subject; and b) after (a), administering to the subject the first ligand in an amount effective to kill less than 30%, or at least 30, 40, 50, 60, 70, 80, 90, or 95% of the modified cells that express the second chimeric polypeptide wherein the first chimeric polypeptide comprises the first multimerizing region and the second chimeric polypeptide comprises the second multimerizing region.

[0019] In some embodiments, methods are provided for treating a subject having a disease or condition associated with an elevated expression of a target antigen expressed by a target cell, comprising (a) transplanting an effective amount of modified cells into the subject; wherein the modified cells comprise a modified cell of the present application, wherein the modified cell comprises a chimeric antigen receptor comprising an antigen recognition moiety that binds to the target antigen, and (b) after a), administering an effective amount of the second ligand to reduce the number or concentration of target antigen or target cells in the subject wherein the first chimeric polypeptide comprises the first multimerizing region and the second chimeric polypeptide comprises the second multimerizing region. In some embodiments, the methods further comprise after b), administering the first ligand in an amount effective to kill less than 30%, or at least 30, 40, 50, 60, 70, 80, 90, or 95% of the modified cells that express the second chimeric polypeptide.

[0020] In some embodiments, the first multimerizing region comprises two FKBP12v36 regions, and the second multimerizing region comprises an FRB or FRB variant region. In some embodiments, the pro-apoptotic polypeptide is a caspase polypeptide.

[0021] Also provided in some embodiments are nucleic acids that comprise a promoter, operably linked to a first polynucleotide and a second polynucleotide, wherein a) the first polynucleotide encodes a first chimeric apoptotic polypeptide comprising a first multimerizing region and a pro-apoptotic polypeptide region; and b) the second polynucleotide encodes a second chimeric apoptotic polypeptide comprising a second multimerizing region and a pro-apoptotic polypeptide region, wherein the second multimerizing region has a different amino acid sequence than the first multimerizing region; wherein the first and second multimerizing regions bind to a first ligand and the pro-apoptotic polypeptide regions are together capable of multimerizing following binding to the first ligand and inducing apoptosis in a cell. In some embodiments, the first multimerizing region binds to a second ligand that does not significantly bind to the second multimerizing region. In some embodiments, the second ligand is not capable of binding to the second multimerizing region. In some embodiments the proapoptotic polypeptide is a caspase polypeptide.

[0022] Also provided in some embodiments are nucleic acids that comprise a promoter operably linked to a polynucleotide coding for a polypeptide comprising a FRB or FRB variant region and a caspase polypeptide region. Also provided in some embodiments are nucleic acids that comprise a promoter, operably linked to a first polynucleotide and a second polynucleotide, wherein a) the first polynucleotide encodes a first chimeric caspase polypeptide comprising a FRB or FRB variant region and a caspase polypeptide region; and b) the second polynucleotide encodes a second chimeric caspase polypeptide comprising an FKBP12 or FKBP12 variant region and a caspase polypeptide region.

[0023] In some embodiments, modified cells are provided that are transfected or transduced with a nucleic acid of the present application. Provided in some embodiments are modified cells, that comprise a) a first polynucleotide encoding a first chimeric apoptotic polypeptide comprising a first multimerizing region and a pro-apoptotic polypeptide region and a second multimerizing region; and b) a second polynucleotide encoding a second chimeric apoptotic polypeptide comprising a second multimerizing region and a pro-apoptotic polypeptide region, wherein the second multimerizing region has a different amino acid sequence than the first multimerizing region; wherein the first and second multimerizing regions bind to a first ligand and the pro-apoptotic polypeptide regions are together capable of multimerizing following binding to the first ligand and inducing apoptosis in the cell. In some embodiments, the first multimerizing region binds to a second ligand that does not significantly bind to the second multimerizing region.

[0024] In some embodiments, a nucleic acid is provided comprising a promoter, operably linked to a polynucleotide encoding a first polypeptide, wherein the first polypeptide comprises a scaffold region comprising at least two first multimerizing regions or at least two second multimerizing regions, wherein each of the first multimerizing regions is different than each of the second multimerizing regions. In some embodiments, the nucleic acid further comprises a second polynucleotide encoding a second chimeric polypeptide, wherein the second chimeric polypeptide comprises a pro-apoptotic polypeptide region and the first multimerizing region or the second multimerizing region, wherein the second multimerizing region has a different amino acid sequence than the first multimerizing region; wherein: the first multimerizing region and the second multimerizing region bind to a first ligand; and the first polypeptide comprises the first multimerizing region and the second chimeric polypeptide comprises the second multimerizing region, or the first polypeptide comprises the second multimerizing region and the second chimeric polypeptide comprises the first multimerizing region. In some embodiments, the first ligand comprises a first portion, the first multimerizing region binds to the first portion, and the second multimerizing region does not significantly bind to the first portion. In some embodiments, the second multimerizing region binds to a second ligand, and the first multimerizing region does not significantly bind to the first multimerizing region.

[0025] Also provided in some embodiments are modified cells that comprise a polynucleotide encoding a first polypeptide, wherein the first polypeptide comprises a scaffold region comprising at least two first multimerizing regions or at least two second multimerizing regions, wherein each of the first multimerizing regions is different than each of the second multimerizing regions. In some embodiments, the modified cell further comprises a second polynucleotide encoding a second chimeric polypeptide, wherein the second chimeric polypeptide comprises a pro-apoptotic polypeptide region and the first multimerizing region or the second multimerizing region, wherein the second multimerizing region has a different amino acid sequence than the first multimerizing region; wherein: the first multimerizing region and the second multimerizing region bind to a first ligand; and the first polypeptide comprises the first multimerizing region and the second chimeric polypeptide comprises the second multimerizing region, or the first polypeptide comprises the second multimerizing region and the second chimeric polypeptide comprises the first multimerizing region.

[0026] Also provided in some embodiments are modified cells that comprise a first polynucleotide encoding a scaffold polypeptide, wherein the scaffold polypeptide comprises at least two FRB or FRB variant regions, and a second polynucleotide encoding a chimeric polypeptide comprising an FKBP12 or FKBP12 variant region and a Caspase-9 polypeptide. Also provided in some embodiments are modified cells that comprise a first polynucleotide encoding a scaffold polypeptide, wherein the scaffold polypeptide comprises at least two FKBP12 or FKBP12 variant regions, and a second polynucleotide encoding a chimeric polypeptide comprising a FRB or FRB variant and a Caspase-9 polypeptide. In some embodiments, the modified cells further comprise a chimeric antigen receptor, or a chimeric T cell receptor.

[0027] Provided in some embodiments are methods of controlling survival of transplanted modified cells in a subject, comprising: a) transplanting modified cells of the present application into the subject; and b) after (a), administering to the subject rapamycin or a rapalog, in an amount effective to kill less than 30%, or at least 30, 40, 50, 60, 70, 80, 90, or 95% of the modified cells that express the second chimeric polypeptide comprising the pro-apoptotic polypeptide region. In some embodiments, the second multimerizing region is a FKBP12 or FKBP12 variant region, further comprising administering a ligand that binds to the FKBP12 or FKBP12 variant region on the second chimeric polypeptide comprising the pro-apoptotic polypeptide region in an amount effective to kill at least 90% of the modified cells that express the second chimeric polypeptide. In some embodiments, methods are provided for treating a subject having a disease or condition associated with an elevated expression of a target antigen expressed by a target cell, comprising (a) administering to the subject an effective amount of a modified cell of the present application, wherein the modified cell further comprises a polynucleotide coding for a chimeric antigen receptor or a T cell receptor that bind to the target antigen; and (b) after a), administering an effective amount of a ligand, rapamycin, or a rapalog.

[0028] Also provided in some embodiments is a nucleic acid comprising a promoter, operably linked to a) a first polynucleotide encoding a first chimeric polypeptide, wherein the first chimeric polypeptide comprises (i) two FKBP12v36 regions; (ii) a truncated MyD88 polypeptide region lacking the TIR domain; and (iii) a CD40 cytoplasmic polypeptide region lacking the CD40 extracellular domain; b) a second polynucleotide encoding a second chimeric polypeptide, wherein the second chimeric polypeptide comprises a Caspase-9 region and a FRB_{L}; and c) a third polynucleotide encoding a chimeric antigen receptor comprising a transmembrane region, a T cell activation molecule, and an antigen recognition moiety selected from the group consisting of Her2/Neu, PSCA, and CD19. Also provided in some embodiments is a modified cell, comprising a) a first polynucleotide encoding a first chimeric polypeptide, wherein the first chimeric polypeptide comprises (i) two FKBP12v36 regions; (ii) a truncated MyD88 polypeptide region lacking the TIR domain; and (iii) a CD40 cytoplasmic polypeptide region lacking the CD40 extracellular domain; b) a second polynucleotide encoding a second chimeric polypeptide, wherein the second chimeric polypeptide comprises a Caspase-9 region and a FRB_{L}; and c) a third polynucleotide encoding a chimeric antigen receptor comprising a transmembrane region, a T cell activation molecule, and a Her2/Neu antigen recognition moiety.

[0029] In some embodiments, a nucleic acid is provided comprising a promoter, operably linked to a) a first polynucleotide encoding a first chimeric polypeptide, wherein the first chimeric polypeptide comprises (i) two FKBP12v36 regions; (ii) a truncated MyD88 polypeptide region lacking the TIR domain; and (iii) a CD40 cytoplasmic polypeptide region lacking the CD40 extracellular domain; b) a second polynucleotide encoding a second chimeric polypeptide, wherein the second chimeric polypeptide comprises a Caspase-9 region and a FRB_{L}; and c) a third polynucleotide encoding a chimeric T cell receptor. Also provided in some embodiments is a modified cell, comprising a) a first polynucleotide encoding a first chimeric polypeptide, wherein the first chimeric polypeptide comprises (i) two FKBP12v36 regions; (ii) a truncated MyD88 polypeptide region lacking the TIR domain; and (iii) a CD40 cytoplasmic polypeptide region lacking the CD40 extracellular domain; b) a second polynucleotide encoding a second chimeric polypeptide, wherein the second chimeric polypeptide comprises a Caspase-9 region and a FRB_{L}; and c) a third polynucleotide encoding a chimeric T cell receptor.

[0030] In some embodiments, a nucleic acid is provided, comprising a promoter operably linked to a first polynucleotide encoding a first chimeric polypeptide, wherein the first chimeric polypeptide comprises (i) a first ligand binding region; (ii) a MyD88 polypeptide region or a truncated MyD88 polypeptide region lacking the TIR domain; and (iii) a CD40 cytoplasmic polypeptide region lacking the CD40 extracellular domain; and a second polynucleotide encoding a second chimeric polypeptide, wherein the second chimeric polypeptide comprises a pro-apoptotic polypeptide region and a second ligand binding region, wherein the second ligand binding region has a different amino acid sequence than the first ligand binding region; wherein the first and second ligand binding regions are capable of binding to a first multimeric ligand; the first ligand binding region is capable of binding to a second ligand; and the second ligand does not significantly bind to the second ligand binding region. Also provided is a nucleic acid comprising a promoter, operably linked to a first polynucleotide encoding a first chimeric polypeptide, wherein the first chimeric polypeptide comprises (i) a first ligand binding region; and (ii) a MyD88 polypeptide region or a truncated MyD88 polypeptide region lacking the TIR domain; and a second polynucleotide encoding a second chimeric polypeptide, wherein the second chimeric polypeptide comprises a pro-apoptotic polypeptide region and a second ligand binding region, wherein the second ligand binding region has a different amino acid sequence than the first ligand binding region; wherein the first and second ligand binding regions are capable of binding to a first ligand; the first ligand binding region is capable of binding to a second ligand; and the second ligand does not significantly bind to the second ligand binding region. In some embodiments, the nucleic acid further comprises a polynucleotide encoding a linker polypeptide between the first and second polynucleotides, wherein the linker polypeptide separates the translation products of the first and second polynucleotides during or after translation, for example, in some embodiments, the linker polypeptide is a 2A polypeptide. In some embodiments, the second ligand is not capable of binding to the second ligand binding region.

[0031] In some embodiments, the nucleic acid further comprises a polynucleotide encoding a chimeric antigen receptor, a T cell receptor, or a T cell receptor-based chimeric antigen receptor. In some embodiments, the chimeric antigen receptor comprises (i) a transmembrane region, (ii) a T cell activation molecule, and (iii) an antigen recognition moiety.

[0032] Also provided are modified cells transfected or transduced with a nucleic acid discussed herein. In other embodiments, modified cells are provided, comprising a first polynucleotide encoding a first chimeric polypeptide, wherein the first chimeric polypeptide comprises (i) a first ligand binding region; (ii) a MyD88 polypeptide region or a truncated MyD88 polypeptide region lacking the TIR domain; and (iii) a CD40 cytoplasmic polypeptide region lacking the CD40 extracellular domain; and a second polynucleotide encoding a second chimeric polypeptide, wherein the second chimeric polypeptide comprises a pro-apoptotic polypeptide region and a second ligand binding region, wherein the second ligand binding region has a different amino acid sequence than the first ligand binding region; wherein the first and second ligand binding regions are capable of binding to a first ligand; the first ligand binding region is capable of binding to a second ligand; and the second ligand does not significantly bind to the second ligand binding region. Also provided are modified cells comprising a first polynucleotide encoding a first chimeric polypeptide, wherein the first chimeric polypeptide comprises (i) a first ligand binding region; and (ii) a MyD88 polypeptide region or a truncated MyD88 polypeptide region lacking the TIR domain; and a second polynucleotide encoding a second chimeric polypeptide, wherein the second chimeric polypeptide comprises a pro-apoptotic polypeptide region and a second ligand binding region, wherein the second ligand binding region has a different amino acid sequence than the first ligand binding region; wherein the first and second ligand binding regions are capable of binding to a first ligand; the first ligand binding region is capable of binding to a second ligand; and the second ligand does not significantly bind to the second ligand binding region. In some embodiments, the second ligand is not capable of binding to the second ligand binding region. In some embodiments, the modified cell of any one of embodiments C1-C4, wherein the modified cell further comprises a third polynucleotide encoding a marker polypeptide. In some embodiments, the first chimeric polypeptide further comprises a marker polypeptide. In some embodiments, the second chimeric polypeptide further comprises a marker polypeptide.

[0033] In some embodiments, the modified cell further comprises a polynucleotide encoding a chimeric antigen receptor, a T cell receptor, or a T cell receptor-based chimeric antigen receptor. In some embodiments, the chimeric antigen receptor comprises (i) a transmembrane region, (ii) a T cell activation molecule, and (iii) an antigen recognition moiety.

[0034] Also provided are methods for stimulating an immune response in a subject, comprising: transplanting modified cells discussed herein into the subject; and then administering an effective amount of the second ligand to stimulate a cell mediated immune response. Also provided are methods of administering a ligand to a human subject who has undergone cell therapy using modified cells discussed herein, comprising administering the second ligand to the human subject. Also provided are methods for controlling activity of transplanted modified cells in a subject, comprising: transplanting modified cells discussed herein into the subject; and then administering an effective amount of the second ligand to stimulate the activity of the transplanted modified cells. The methods may further comprise, in some embodiments, then administering to the subject the first ligand in an amount effective to kill less than 30, 40, 50, 60, 70, 80, 90, or 100% of the modified cells that express the second chimeric polypeptide.

[0035] Also provided are methods for treating a subject having a disease or condition associated with an elevated expression of a target antigen expressed by a target cell, comprising administering to the subject an effective amount of a modified cell of any one of embodiments B1-D14, wherein the cell comprises a chimeric antigen receptor comprising an antigen recognition moiety that binds to the target antigen, and then administering an effective amount of the second ligand to reduce the number or concentration of target antigen or target cells in the subject.

[0036] Also provided are methods for reducing the size of a tumor in a subject, comprising administering modified cells discussed herein to the subject, wherein the cell comprises a chimeric antigen receptor comprising an antigen recognition moiety that binds to an antigen on the tumor; and then administering an effective amount of the second ligand to reduce the size of the tumor in the subject.

[0037] In some embodiments, a modified cell is provided, comprising a first polynucleotide encoding a first chimeric polypeptide, wherein the first chimeric polypeptide comprises a membrane-targeting polypeptide region and a first ligand binding region; and a second polynucleotide encoding a second chimeric polypeptide, wherein the second chimeric polypeptide comprises a pro-apoptotic polypeptide region and a second ligand binding region, wherein the second ligand binding region has a different amino acid sequence than the first ligand binding region; wherein the first and second ligand binding regions are capable of binding to a first multimeric ligand.

[0038] In certain embodiments a modified cell is provided, comprising a first polynucleotide encoding a CAR, wherein the CAR comprises an FKBP12-Rapamycin-Binding domain (FRB); and a second polynucleotide encoding a chimeric caspase polypeptide, wherein the chimeric caspase polypeptide comprises (i) an FKBP multimerizing region and (ii) a caspase polypeptide. Also provided is a modified cell, comprising a first polynucleotide encoding a CAR, wherein the CAR comprises (i) a transmembrane region, (ii) a T cell activation molecule, (iii) an antigen recognition moiety, and (iv) an FKBP12-Rapamycin-Binding domain (FRB); and a second polynucleotide encoding a chimeric caspase polypeptide, wherein the chimeric caspase polypeptide comprises (i) an FKBP multimerizing region and (ii) a caspase polypeptide. Also provided is a modified cell, comprising a first polynucleotide encoding a CAR, wherein the CAR comprises (i) a transmembrane region, (ii) a MyD88 polypeptide or a truncated MyD88 polypeptide lacking a TIR domain, (iii) a CD40 cytoplasmic polypeptide region lacking a CD40 extracellular domain, (iv) a T cell activation molecule, (v) an antigen recognition moiety, and an FKBP12-Rapamycin-Binding domain (FRB); and a second polynucleotide encoding a chimeric caspase polypeptide, wherein the chimeric caspase polypeptide comprises (i) an FKBP multimerizing region and (ii) a caspase polypeptide.

[0039] In some embodiments, the polynucleotides encoding the chimeric polypeptides comprise optimized codons. In some embodiments, the cell is a human cell. The cell of the present application may be any type of eukaryotic cell, for example a mammalian cell, for example a horse, dog, cat, cow, or human cell. In some embodiments, the cell is a progenitor cell. In some embodiments, the cell is a hematopoietic progenitor cell. In some embodiments, the cell is selected from the group consisting of mesenchymal stromal cells, embryonic stem cells, and inducible pluripotent stem cells. In some embodiments, the cell is a T cell. In some embodiments, the cell is obtained or prepared from bone marrow. In some embodiments, the cell is obtained or prepared from umbilical cord blood. In some embodiments, the cell is obtained or prepared from peripheral blood. In some embodiments, the cell is obtained or prepared from peripheral blood mononuclear cells.

[0040] In some aspects, the polynucleotide coding for the chimeric polypeptide or modified Caspase-9 polypeptide is operably linked to a promoter. In some embodiments, the promoter is developmentally regulated and the Caspase-9 polypeptide is expressed in developmentally differentiated cells. In some embodiments, the promoter is tissue-specific and the Caspase-9 polypeptide is expressed in the specific tissue. In some embodiments, the promoter is activated in activated T cells. In some embodiments, the promoter comprises a 5′LTR sequence. In some embodiments, the chimeric protein further comprises a marker polypeptide, for example, but not limited to, a ΔCD19 polypeptide. In some embodiments, the Caspase-9 polypeptide is a truncated Caspase-9 polypeptide. In some embodiments, the Caspase-9 polypeptide lacks the Caspase recruitment domain.

[0041] In some aspects of the present application, the cells are transduced or transfected with a viral vector. The viral vector may be, for example, but not limited to, a retroviral vector, such as, for example, but not limited to, a murine leukemia virus vector; an SFG vector; and adenoviral vector, or a lentiviral vector.

[0042] In some embodiments, the cell is isolated. In some embodiments, the cell is in a human subject. In some embodiments, the cell is transplanted in a human subject.

[0043] In some embodiments, personalized treatment is provided wherein the stage or level of the disease or condition is determined before administration of the multimeric ligand, before the administration of an additional dose of the multimeric ligand, or in determining method and dosage involved in the administration of the multimeric ligand. These methods may be used in any of the methods of any of the diseases or conditions of the present application. Where these methods of assessing the patient before administering the ligand are discussed in the context of graft versus host disease, it is understood that these methods may be similarly applied to the treatment of other conditions and diseases. Thus, for example, in some embodiments of the present application, the method comprises administering therapeutic cells to a patient, and further comprises identifying a presence or absence of a condition in the patient that requires the removal of transfected or transduced therapeutic cells from the patient; and administering a multimeric ligand that binds to the multimerizing region, maintaining a subsequent dosage of the multimeric ligand, or adjusting a subsequent dosage of the multimeric ligand to the patient based on the presence or absence of the condition identified in the patient. And, for example, in other embodiments of the present application, the method further comprises determining whether to administer an additional dose or additional doses of the multimeric ligand to the patient based upon the appearance of graft versus host disease symptoms in the patient. In some embodiments, the method further comprises identifying the presence, absence or stage of graft versus host disease in the patient, and administering a multimeric ligand that binds to the multimerizing region, maintaining a subsequent dosage of the multimeric ligand, or adjusting a subsequent dosage of the multimeric ligand to the patient based on the presence, absence or stage of the graft versus host disease identified in the patient. In some embodiments, the method further comprises identifying the presence, absence or stage of graft versus host disease in the patient, and determining whether a multimeric ligand that binds to the multimerizing region should be administered to the patient, or the dosage of the multimeric ligand subsequently administered to the patient is adjusted based on the presence, absence or stage of the graft versus host disease identified in the patient. In some embodiments, the method further comprises receiving information comprising the presence, absence or stage of graft versus host disease in the patient; and administering a multimeric ligand that binds to the multimerizing region, maintaining a subsequent dosage of the multimeric ligand, or adjusting a subsequent dosage of the multimeric ligand to the patient based on the presence, absence or stage of the graft versus host disease identified in the patient. In some embodiments, the method further comprises identifying the presence, absence or stage of graft versus host disease in the patient, and transmitting the presence, absence or stage of the graft versus host disease to a decision maker who administers a multimeric ligand that binds to the multimerizing region, maintains a subsequent dosage of the multimeric ligand, or adjusts a subsequent dosage of the multimeric ligand administered to the patient based on the presence, absence or stage of the graft versus host disease identified in the subject. In some embodiments, the method further comprises identifying the presence, absence or stage of graft versus host disease in the patient, and transmitting an indication to administer a multimeric ligand that binds to the multimeric binding region, maintain a subsequent dosage of the multimeric ligand or adjust a subsequent dosage of the multimeric ligand administered to the patient based on the presence, absence or stage of the graft versus host disease identified in the subject.

[0044] Also provided is a method for administering donor T cells to a human patient, comprising administering a transduced or transfected T cell of the present application to a human patient, wherein the cells are non-allodepleted human donor T cells.

[0045] In some embodiments, the therapeutic cells are administered to a subject having a non-malignant disorder, or where the subject has been diagnosed with a non-malignant disorder, such as, for example, a primary immune deficiency disorder (for example, but not limited to, Severe Combined Immune Deficiency (SCID), Combined Immune Deficiency (CID), Congenital T-cell Defect/Deficiency, Common Variable Immune Deficiency (CVID), Chronic Granulomatous Disease, IPEX (Immune deficiency, polyendocrinopathy, enteropathy, X-linked) or IPEX-like, Wiskott-Aldrich Syndrome, CD40 Ligand Deficiency, Leukocyte Adhesion Deficiency, DOCK 8 Deficiency, IL-10 Deficiency/IL-10 Receptor Deficiency, GATA 2 deficiency, X-linked lymphoproliferative disease (XLP), Cartilage Hair Hypoplasia, and the like), Hemophagocytosis Lymphohistiocytosis (HLH) or other hemophagocytic disorders, Inherited Marrow Failure Disorders (such as, for example, but not limited to, Shwachman Diamond Syndrome, Diamond Blackfan Anemia, Dyskeratosis Congenita, Fanconi Anemia, Congenital Neutropenia, and the like), Hemoglobinopathies (such as, for example, but not limited to, Sickle Cell Disease, Thalassemia, and the like), Metabolic Disorders (such as, for example, but not limited to, Mucopolysaccharidosis, Sphingolipidoses, and the like), or an Osteoclast disorder (such as, for example, but not limited to Osteopetrosis).

[0046] The therapeutic cells may be, for example, any cell administered to a patient for a desired therapeutic result. The cells may be, for example, T cells, natural killer cells, B cells, macrophages, peripheral blood cells, hematopoietic progenitor cells, bone marrow cells, or tumor cells. The modified Caspase-9 polypeptide can also be used to directly kill tumor cells. In one application, vectors comprising polynucleotides coding for the inducible modified Caspase-9 polypeptide would be injected into a tumor and after 10-24 hours (to permit protein expression), the ligand inducer, such as, for example, AP1903, would be administered to trigger apoptosis, causing the release of tumor antigens to the microenvironment. To further improve the tumor microenvironment to be more immunogenic, the treatment may be combined with one or more adjuvants (e.g., IL-12, TLRs, IDO inhibitors, etc.). In some embodiments, the cells may be delivered to treat a solid tumor, such as, for example, delivery of the cells to a tumor bed. In some embodiments, a polynucleotide encoding the chimeric Caspase-9 polypeptide may be administered as part of a vaccine, or by direct delivery to a tumor bed, resulting in expression of the chimeric Caspase-9 polypeptide in the tumor cells, followed by apoptosis of tumor cells following administration of the ligand inducer. Thus, also provided in some embodiments are nucleic acid vaccines, such as DNA vaccines, wherein the vaccine comprises a nucleic acid comprising a polynucleotide that encodes an inducible, or modified inducible Caspase-9 polypeptide of the present application. The vaccine may be administered to a subject, thereby transforming or transducing target cells in vivo. The ligand inducer is then administered following the methods of the present application.

[0047] In some embodiments, the modified Caspase-9 polypeptide is a truncated modified Caspase-9 polypeptide. In some embodiments, the modified Caspase-9 polypeptide lacks the Caspase recruitment domain. In some embodiments, the Caspase-9 polypeptide comprises the amino acid sequence of SEQ ID NO: 9, or a fragment thereof, or is encoded by the nucleotide sequence of SEQ ID NO: 8, or a fragment thereof.

[0048] In some embodiments, the methods further comprise administering a multimeric ligand that binds to the multimeric ligand binding region. In some embodiments, the multimeric ligand binding region is selected from the group consisting of FKBP, cyclophilin receptor, steroid receptor, tetracycline receptor, heavy chain antibody subunit, light chain antibody subunit, single chain antibodies comprised of heavy and light chain variable regions in tandem separated by a flexible linker domain, and mutated sequences thereof. In some embodiments, the multimeric ligand binding region is an FKBP12 region. In some embodiments, the multimeric ligand is an FK506 dimer or a dimeric FK506-like analog ligand. In some embodiments, the multimeric ligand is AP1903. In some embodiments, the number of therapeutic cells is reduced by from about 60% to 99%, about 70% to 95%, from 80% to 90% or about 90% or more after administration of the multimeric ligand. In some embodiments, after administration of the multimeric ligand, donor T cells survive in the patient that are able to expand and are reactive to viruses and fungi. In some embodiments, after administration of the multimeric ligand, donor T cells survive in the patient that are able to expand and are reactive to tumor cells in the patient.

[0049] In some embodiments, the suicide gene used in the second level of control is a caspase polypeptide, for example, Caspase 1, 2, 3, 4, 5, 6, 7, 8, 9, 10, 11, 12, 13, or 14. In certain embodiments, the caspase polypeptide is a Caspase-9 polypeptide. In certain embodiments, the Caspase-9 polypeptide comprises an amino acid sequence of a catalytically active (not catalytically dead) caspase variant polypeptide provided in Table 5 or 6 herein. In other embodiments, the Caspase-9 polypeptide consists of an amino acid sequence of a catalytically active (not catalytically dead) caspase variant polypeptide provided in Table 5 or 6 herein. In other embodiments, a caspase polypeptide may be used that has a lower basal activity in the absence of the ligand inducer. For example, when included as part of a chimeric inducible caspase polypeptide, certain modified Caspase-9 polypeptides may have lower basal activity compared to wild type Caspase-9 in the chimeric construct. For example, the modified Caspase-9 polypeptide may comprise an amino acid sequence having at least 90% sequence identity to SEQ ID NO: 9, and may comprise at least one amino acid substitution.

[0050] Certain embodiments are described further in the following description, examples, claims and drawings.

### BRIEF DESCRIPTION OF THE DRAWINGS

[0051] The drawings illustrate embodiments of the technology and are not limiting. For clarity and ease of illustration, the drawings are not made to scale and, in some instances, various aspects may be shown exaggerated or enlarged to facilitate an understanding of particular embodiments.

[0052] FIG. 1A illustrates various iCasp9 expression vectors as discussed herein. FIG. 1B illustrates a representative western blot of full length and truncated Caspase-9 protein produced by the expression vectors shown in FIG. 1A. FIG. 1A discloses “GCCACC” as SEQ ID NO: 923 and “Ser-Gly-Gly-Gly-Ser” as SEQ ID NO: 924.

[0053] FIG. 2 is a schematic of the interaction of the suicide gene product and the CID to cause apoptosis.

[0054] FIG. 3 is a schematic depicting a two-tiered regulation of apoptosis. The left section depicts rapalog-mediated recruitment of an inducible caspase polypeptide to FRBI-modified CAR. The right section depicts a rimiducid (AP1903)-mediated inducible caspase polypeptide.

[0055] FIG. 4 is a plasmid map of a vector encoding FRB_{L}-modified CD19-MC-CAR and inducible Caspase-9. pSFG-iCasp9-2A-CD19-Q-CD28stm-MCz-FRB_{L}2.

[0056] FIG. 5 is a plasmid map of a vector encoding FRB_{L}-modified Her2-MC-CAR and an inducible Caspase-9 polypeptide. pSFG-iCasp9-2A-aHer2-Q_CD28stm-mMCz-FRB_{L}2.

[0057] FIGS. 6A and 6B provide the results of an assay of two-tiered activation of apoptosis. FIG. 6A shows recruitment of an inducible Caspase-9 polypeptide (iC9) with rapamycin, leading to more gradual apoptosis titration. FIG. 6B shows complete apoptosis using rimiducid (AP1903).

[0058] FIG. 7 is a plasmid map of the pBP0545 vector,

[0059] pBP0545.pSFG.iCasp9.2A.Her2scFv.Q.CD8stm.MC-zeta.

[0060] FIGS. 8A-8C illustrate that FRB or FKBP12-based scaffolds can multimerize signaling domains. FIG. 8A. Homodimerization of a signaling domain (red stick), like Caspase-9, can be achieved via a heterodimer that binds to the FRB-fused signaling domain on one side and FKBP12-fused domain on the other. FIG. 8B. Dimerization or multimerization of a signaling domain via 2 (left) or more (right) tandem copies of FRB (chevron). The scaffold can contain subcellular targeting sequences to localize proteins to the plasma membrane (as depicted), the nucleus or organelles. FIG. 8C. Similar to FIG. 8B, but domain polarity is reversed.

[0061] FIGS. 9A-9C provide schematics of iMC-mediated scaffolding of FRB_{L}2. Caspase-9. FIG. 9A. In the presence of a heterodimer drug, such as a rapamycin, the FRB_{L}2-linked Caspase-9 binds with and clusters the FKBP-modified MyD88/CD40 (MC) signaling molecule. This clustering effect results in dimerization of FRB_{L}2. Caspase-9 and subsequent induction of cellular death via the apoptotic pathway. FIG. 9B. Similar to panel 9A, however the FKBP and FRB domains have been switched in relation to associated Caspase-9 and MC domains. The clustering effect still occurs in the presence of heterodimer drug. FIG. 9C. Similar to panel 9A; however there is only one FKBP domain attached to MC. Therefore, in the presence of heterodimer, Caspase-9 is no longer capable of being clustered and therefore apoptosis is not induced.

[0062] FIG. 10A-10E provide schematics of a rapalog-induced, FRB scaffold-based CaspaCIDe. FIG. 10A: Rimiducid homodimerizes FKBPv-linked Caspase-9, resulting in dimerization and activation of Caspase-9 with subsequent induction of cellular death via the apoptotic pathway. FIG. 10B: Rapalogs heterodimerize FKBPv-linked Caspase-9 with FRB-linked Caspase-9, resulting in dimerization of Caspase-9 and cell death. FIG. 100, FIG. 10D, FIG. 10E are schematics illustrating that in the presence of a heterodimer drug, such as a rapalog, 2 or more FRB_{L} domains act as a scaffold to recruit binding of FKBPv-linked Caspase-9, leading to dimerization or oligomerization of Caspase-9 and cell death.

[0063] FIG. 11A is a schematic and FIG. 11B is a line graph depicting activation of apoptosis by dimerization of a chimeric FRB-Caspase-9 polypeptide and a chimeric FKBP-Caspase-9 polypeptide (FRB_{L}-ΔCaspase-9 and FKBPv-ΔCaspase-9) with rapamycin. FIG. 11A. Schematic representation of dimerization of FRB and FKBP12 with rapamycin to bring together fused Caspase-9 signaling domains and activation of apoptosis. FIG. 11B. Reporter assays were performed in HEK-293T cells transfected with the constitutive SRα-SEAP reporter (pBP046, 1 μg), a fusion of FRB_{L} (L2098) and human αCaspase-9 (pBP0463, 2 μg) and a fusion of FKBP12 with αCaspase-9 (pBP0044, 2 μg).

[0064] FIG. 12A is a schematic and FIGS. 12B and 12C are line graphs depicting assembly of FKBP-Caspase-9 on a FRB-based scaffold. FIG. 12A: Schematic of iterated FRB domains to provide scaffolds for rapamycin (or rapalog)-mediated multimerization of an FKBP12-Caspase-9 fusion protein. FIG. 12B: Cultures of HEK-293 cells were transfected (via Genejuice, Novagen) with the constitutive SRα-SEAP reporter plasmid (pBP0046, 1 μg), a fusion of human FKBP12 with human Caspase-9 (pBP0044, 2 μg) and FRB-encoding expression constructs, containing four copies of FRB_{L} (pBP0725, 2 μg) or control vectors encoding zero or one copy of FRB_{L}. 24 hours post-transfection, cells were distributed into 96-well plates and rapamycin or a derivative rapalog, C7-isopropoxyrapamycin, with specificity for the mutant FRB_{L} (Liberles et al, 1997) were administered in triplicate wells. Placental SEAP reporter activity was determined 24 hours post-drug administration. FIG. 12C: Reporter assays were performed as in (B), but FRB-scaffolds were expressed from constructs encoding iterated FRB_{L} domains with an amino-terminal myristoylation-targeting sequence and two (pBP0465) or four copies (pBP0721) of the FRB_{L} domain.

[0065] FIG. 13A is a schematic and FIG. 13B is a line graph depicting assembly of FRB-ΔCaspase-9 on an FKBP scaffold. FIG. 13A. Schematic of iterated FKBP12 domains to produce scaffolds for assembly of rapamycin (or rapalog)-mediated multimerization of FRB-ΔCaspase-9 fusion protein, leading to apoptosis. FIG. 13B. Reporter assays were performed as in FIGS. 12B and C with cultures of HEK-293T cells transfected with the constitutive SRα-SEAP reporter (pBP046, 1 μg), a fusion of FRB_{L} (L2098) and CARD domain-deleted human αCaspase-9 (pBP0463, 2 μg) and FKBP expression constructs containing four tandem copies of FKBP12 (pBP722, 2 μg) or a control vector with one copy of FKBP (pS-SF1E).

[0066] FIGS. 14A-14B provide line graphs showing that heterodimerization of FRB_{L} scaffold with iCaspase9 induces cell death. Primary T cells from three different donors (307, 582, 584) were transduced with pBP0220—pSFG-iC9.T2A-ΔCD19, pBP0756-pSFG-iC9.T2A-ΔCD19.P2A-FRB_{L}, pBP0755-pSFG-iC9.T2A-ΔCD19.P2A-FRB_{L}2, or pBP0757-pSFG-iC9.T2A-ΔCD19.P2A-FRB_{L}3, containing CaspaCIDe, CD19 marker, and 0-3 tandem copies of FRB_{L}, respectively. T Cells were plated with varying concentrations of rapamycin and after 24 and 48 hours cell aliquots were harvested, stained with APC-CD19 antibody and analyzed by flow cytometry. Cells were initially gated on live lymphocytes by FSC vs SSC. Lymphocytes were then plotted as a CD19 histogram and subgated for high, medium and low expression within the CD19⁺ gate. Line graphs represent the relative percentage of the total cell population that express high levels of CD19, normalized to the no “0” drug control. All data points were done in duplicates. FIG. 14A: donor 307, 24 hr; FIG. 14B: donor 582, 24 hr; FIG. 14C: donor 584 24 hr; FIG. 14D: donor 582 48 hr; FIG. 14E: donor 584 48 hr.

[0067] FIGS. 15A-15C provide line graphs and a schematic showing that rapamycin induces CaspaCIDe killing in the presence of tandem FRB_{L} domains. HEK-293 cells were transfected with 1 μg of SRα-SEAP constitutive reporter plasmid along with either negative (Neg) control, eGFP (pBP0047), CaspaCIDe (iC9/pBP0044) alone, or CaspaCIDe along with iMC.FRB_{L} (pBP0655)+anti-HER2.CAR.Fpk2 (pBP0488) or iMC.FRB_{L}2 (pBP0498)+anti-HER2.CAR.Fpk2. Cells were then plated with half-log dilutions of rimiducid or rapamycin and assayed for SEAP as previously described. Diminution of SEAP activity correlates with cell elimination. Schematic represents one possible rapamycin-mediated complex of signaling domains, which lead to Caspase-9 clustering and apoptosis. FIG. 15A: rimiducid; FIG. 15B: rapamycin; FIG. 15C: schematic.

[0068] FIGS. 16A and 16B are line graphs showing that tandem FKBP scaffold mediates FRB_{L}2. Caspase activation in the presence of rapalogs. FIG. 16A. HEK-293 cells were transfected with 1 μg each of SRα-SEAP reporter plasmid, ΔmyriMC.2A-anti-CD19.CAR.CD3ζ (pBP0608), and FRB_{L}2. Caspase-9 (pBP0467). After 24 hours, transfected cells were harvested and treated with varying concentrations of either rimiducid, rapamycin, or rapalog, C7-isopropoxy (IsoP)-rapamycin. After ON incubation, cell supernatants were assayed for SEAP activity, as previously described. FIG. 16B. Similar to the experiment described in (FIG. 16A), except that cells were transfected with a membrane-localized (myristoylated) iMC.2A-CD19.CAR.CD3ζ (pBP0609), instead of non-myristoylated ΔmyriMC.2A-CD19.CAR.CD3ζ (pBP0608).

[0069] FIGS. 17A-17E provides line graphs and the results of FACs analysis showing that the iMC “switch”, FKBP2.MyD88.CD40, creates a scaffold for FRB_{L}2. Caspase9 in the presence of rapamycin, inducing cell death. FIG. 17A. Primary T cells (2 donors) were transduced with γ-RV, SFG-ΔMyr.iMC.2A-CD19 (from pBP0606) and SFG-FRB_{L}2. Caspase9.2A-Q.8stm.zeta (from pBP0668). Cells were plated with 5-fold dilutions of rapamycin. After 24 hours, cells were harvested and analyzed by flow cytometry for expression of iMC (anti-CD19-APC), Caspase-9 (anti-CD34-PE), and T cell identity (anti-CD3-PerCPCy5.5). Cells were initially gated for lymphocyte morphology by FSC vs SSC, followed by CD3 expression (˜99% of the lymphocytes). CD3⁺ lymphocytes were plotted for CD19 (ΔmyriMC.2A-CD19) vs CD34 (FRB_{L}2. Caspase9.2A-Q.8stm.zeta) expression. To normalize gated populations, percentages of CD34⁺CD19⁺ cells were divided by percent CD19⁺CD34⁻ cells within each sample as an internal control. Those values were then normalized to drug free wells for each transduction which were set at 100%. Similar analysis was applied to the Hi-, Med-, and Lo-expressing cells within the CD34⁺CD19⁺ gate. FIG. 17B. Representative example of how cells were gated for Hi, Med, and Lo expression. FIG. 17C. Representative scatter plots of final CD34 vs CD19 gates. As rapamycin increased, % CD34⁺CD19⁺ cells decreased, indicating elimination of cells. FIG. 17D and FIG. 17E. T cells from a single donor were transduced with ΔMyriMC.2A-CD19 (pBP0606) or FRB_{L}2. Caspase9.2A-Q.8stm.zeta (pBP0668). Cells were plated in IL-2-containing media along with varying amounts of rapamycin for 24 or 48 hrs. Cells were then harvested and analyzed, as above.

[0070] FIG. 18 Plasmid map of pBP0044: pSH1-iCaspase9 wt.

[0071] FIG. 19 Plasmid map of pBP0463—pSH1-Fpk-Fpk′.LS.Fpk″. Fpk′″.LS.HA.

[0072] FIG. 20 Plasmid map of pBP0725—pSH1-FRBI.FRBI′.LS.FRBI″.FRBI″.′

[0073] FIG. 21 Plasmid map of pBP0465—pSH1-M-FRBI.FRBI′.LS.HA.

[0074] FIG. 22 Plasmid map of pBP0721—pSH1-M-FRBI.FRB′.LS.FRBI″.FRBI′″HA.

[0075] FIG. 23 Plasmid map of pBP0722—pSH1-Fpk-Fpk′Fpk″.Fpk′″.LS.HA.

[0076] FIG. 24 Plasmid map of pBP0220—pSFG-iC9.T2A-ΔCD19.

[0077] FIG. 25 Plasmid map of pBP0756—pSFG-iC9.T2A-dCD19.P2A-FRBI.

[0078] FIG. 26 Plasmid map of pBP0755—pSFG-iC9.T2A-dCD19.P2A-FRBI2.

[0079] FIG. 27 Plasmid map of pBP0757—pSFG-iC9.T2A-dCD19.P2A-FRBI3.

[0080] FIG. 28 Plasmid map of pBP0655—pSFG-ΔMyr.FRBI.MC.2A-ΔCD19.

[0081] FIG. 29 Plasmid map of pBP0498—pSFG-ΔMyriMC.FRBI2.P2A-ΔCD19.

[0082] FIG. 30 Plasmid map of pBP0488—pSFG-aHER2.Q.8stm.CD3zeta.Fpk2.

[0083] FIG. 31 Plasmid map of pBP0467—pSH1-FRBI′.FRBI.LS.ΔCaspase9.

[0084] FIG. 32 Plasmid map of pBP0606—pSFG-k-ΔMyr.iMC.2A-ΔCD19.

[0085] FIG. 33 Plasmid map of pBP0607—pSFG-k-iMC.2A-ΔCD19

[0086] FIG. 34 Plasmid map of pBP0668—pSFG-FRBIx2.Caspase9.2A-Q.8stm.CD3zeta.

[0087] FIG. 35 Plasmid map of pBP0608—pSFG-ΔMyriMC.2A-ΔCD19.Q.8stm.CD3zeta.

[0088] FIG. 36 Plasmid map of pBP0609: pSFG-iMC.2A-ΔCD19.Q.8stm.CD3zeta.

[0089] FIG. 37A provides a schematic of rimiducid binding to two copies of a chimeric Caspase-9 polypeptide, each having a FKBP12 multimerizing region. FIG. 37B provides a schematic of rapamycin binding to two chimeric Caspase-9 polypeptides, one of which has a FKBP12 multimerizing region and the other which has a FRB multimerizing region. FIG. 37C provides a graph of assay results using these chimeric polypeptides.

[0090] FIG. 38A provides a schematic of rapamycin or rapalog binding to two chimeric Caspase-9 polypeptides, one of which has a FKBP12v36 multimerizing region and the other which has a FRB variant (FRB) multimerizing region. FIG. 38B provides a graph of assay results using this chimeric polypeptide.

[0091] FIG. 39A provides a schematic of rimiducid binding to two chimeric Caspase-9 polypeptides, each of which has a FKBP12v36 multimerizing region, and rapamycin binding to only one chimeric Caspase-9 polypeptide having a FKBP12v36 multimerizing region. FIG. 39B provides a graph of assay results comparing the effects of rimiducid and rapamycin.

[0092] FIG. 40A provides a schematic of rimiducid binding to two chimeric Caspase-9 polypeptides, each of which has a FKBP12v36 multimerizing region, and rapamycin binding to only one chimeric Caspase-9 polypeptide having a FKBP12v36 multimerizing region in the presence of a FRB multimerization polypeptide. FIG. 40B provides a graph of assay results using these polypeptides, comparing the effects of rimiducid and rapamycin.

[0093] FIG. 41 provides a plasmid map of pBP0463.pFRBI.LS.dCasp9.T2A.

[0094] FIG. 42 provides a plasmid map of pBP044-pSH1.iCasp9WT.

### DETAILED DESCRIPTION

[0095] As a mechanism to translate information from the external environment to the inside of the cell, regulated protein-protein interactions evolved to control most, if not all, signaling pathways. Transduction of signals is governed by enzymatic processes, such as amino acid side chain phosphorylation, acetylation, or proteolytic cleavage that lack intrinsic specificity. Furthermore, many proteins or factors are present at cellular concentrations or at subcellular locations that preclude spontaneous generation of a sufficient substrate/product relationship to activate or propagate signaling. An important component of activated signaling is the recruitment of these components to signaling “nodes” or spatial signaling centers that efficiently transmit (or attenuate) the pathway via appropriate upstream signals.

[0096] As a tool to artificially isolate and manipulate individual protein-protein interactions and hence individual signaling proteins, chemically induced dimerization (CID) technology was developed to impose homotypic or heterotypic interactions on target proteins to reproduce natural biological regulation. In its simplest form, a single protein would be modified to contain one or more structurally identical ligand binding domains, which would then be the basis of homodimerization or oligomerization, respectively, in the presence of a cognate homodimeric ligand (Spencer D M et al (93) Science 262, 1019-24). A slightly more complicated version of this concept would involve placing one or more distinct ligand binding domains on two different proteins to enable heterodimerization of these signaling molecules using small molecule, heterodimeric ligands that bind to both distinct domains simultaneously (Ho S N et al (96) Nature 382, 822-6). This drug-mediated dimerization creates a very high local concentration of ligand binding-domain-tagged components sufficient to permit their induced or spontaneous assembly and regulation.

[0097] In some embodiments, provided herein are methods to induce multimerization of proteins. In this case, two or more heterodimer ligand binding regions (or “domains”) in tandem are used as a “molecular scaffold” to dimerize or oligomerize a second, signaling domain-containing protein that is fused to one or more copies of the second binding site for the heterodimeric ligand. The molecular scaffold can be expressed as an isolated multimer of ligand binding domains (FIG. 8), either localized within the cell or unlocalized (FIG. 8B, 8C), or it can be attached to another protein that provides a structural, signaling, cell marking, or more complex combinatorial function (FIG. 9). By “scaffold” is meant a polypeptide that comprises at least two, for example, two or more, heterodimer ligand binding regions; in certain examples the ligand binding regions are in tandem, that is, each ligand binding region is located directly proximal to the next ligand binding region. In other examples, each ligand binding region may be located close to the next ligand binding region, for example, separated by about 1, 2, 3, 4, 5, 6, 7, 8, 9, 10, 11, 12, 13, 14, 15, 16, 17, 18, 19, 20, 25, 30, 35, 40, 45, 50, 55, 60, 65, 70, 75, 80 or more amino acids, but retain the scaffold function of dimerization of an inducible caspase molecule in the presence of a dimerizer. A scaffold may comprise, for example, at least 2, 3, 4, 5, 6, 7, 8, 9, 10, 11, 12, 13, 14, 15, 16, 17, 18, 19, 20 or more ligand binding regions, and may also be linked to another polypeptide, such as, for example, a marker polypeptide, a costimulating molecule, a chimeric antigen receptor, a T cell receptor, or the like.

[0098] In some embodiments, the first polypeptide consists essentially of at least two, three, four, five, six, seven, eight, nine, ten, 11, 12, 13, 14, 15, 16, 17, 18, 19, or 20 units of the first multimerizing region. In some embodiments, first polypeptide consists essentially of the scaffold region. In some embodiments, the first polypeptide consists essentially of a membrane association region or a membrane targeting region. By “consists essentially of” is meant that the scaffold units or the scaffold may be alone, can optionally include linker polypeptides at either terminus of the scaffold, or between the units, and can optionally include small polypeptides such as, for example stem polypeptides as shown in FIGS. 10B, 100, 10D, and 10E.

[0099] In one example, a tandem multimer of the ˜89 aa FK506-rapamycin binding (FRB) domain derived from the protein kinase mTOR (Chen J et al (95) PNAS, 92, 4947-51) is used to recruit multiple FKBPv36-fused Caspase-9 (CaspaCIDe/iCaspase-9) in the presence of rapamycin or a rapamycin-based analogue (“rapalog”) (Liberles S D (97) PNAS 94, 7825-30; Rivera V M (96) Nat Med 2, 1028-1032, Stankunas K (03) Mol Cell 12, 1615-24; Bayle J H (06) Chem & Biol, 13, 99-107) (FIGS. 1-3). This recruitment leads to spontaneous caspase dimerization and activation.

[0100] In a second example, the tandem FRB domains are fused to a chimeric antigen receptor (CAR) and this provides rapalog-driven CaspaCIDe activation to cells expressing both fusion proteins (FIG. 15, inset).

[0101] In a third example, the polarity of the two proteins are reversed so that two or more copies of FKBP12 are used to recruit and multimerize FRB-modified signaling molecules in the presence of rapamycin (FIG. 8C, 9A).

[0102] In some examples, a chimeric polypeptide may comprise a single ligand binding region, or a scaffold comprising more than one ligand binding region may be, where the chimeric polypeptide comprises a polypeptide such as, for example, a MyD88 polypeptide, a truncated MyD88 polypeptide, a cytoplasmic CD40 polypeptide, a chimeric MyD88/cytoplasmic CD40 polypeptide or a chimeric truncated MyD88/cytoplasmic CD40 polypeptide.

[0103] In a fourth example, unstable FRB variants (e.g., FRBL2098) are used to destabilize the signaling molecule prior to rapalog administration (Stankunas K (03) Mol Cell 12, 1615-24; Stankunas K (07) ChemBioChem 8, 1162-69) (FIG. 9, 10). Following rapalog exposure, the unstable fusion molecule is stabilized leading to aggregation as before, but with lower background signaling.

[0104] The use of ligands to direct signaling proteins may be generally applied to activate or attenuate many signaling pathways. Examples are provided herein that demonstrate a utility of the approach by controlling apoptosis or programmed cell death with the “initiating caspase”, Caspase-9 as the primary target. Control of apoptosis by dimerization of proapoptotic proteins with widely available rapamycin or more proprietary rapalogs, should permit an experimenter or clinician to tightly and rapidly control the viability of a cell-based implant that displays unwanted effects. Examples of these effects include, but are not limited to, Graft versus Host (GvH) immune responses against off-target tissue or excessive, uncontrolled growth or metastasis of an implant. Rapid induction of apoptosis will severely attenuate the unwanted cell's function and permit the natural clearance of the dead cells by phagocytic cells, such as macrophages, without undue inflammation. Apoptosis is tightly regulated and naturally uses scaffolds, such as Apaf-1, CRADD/RAIDD, or FADD/Mort1, to oligomerize and activate the caspases that can ultimately kill the cell. Apaf-1 can assemble the apoptotic protease Caspase-9 into a latent complex that then forms an active oligomeric apoptosome upon recruitment of cytochrome C to the scaffold. The key event is oligomerization of the scaffold units causing dimerization and activation of the caspase. Similar adapters, such as CRADD, can oligomerize Caspase-2, leading to apoptosis. The compositions and methods provided herein use, for example, multimeric versions of the ligand binding domains FRB or FKBP to serve as scaffolds that permit the spontaneous dimerization and activation of caspase units present as FRB or FKBP fusions upon recruitment with rapamycin.

[0105] Using certain of the methods provided in the examples herein, caspase activation occurs only when rapamycin or rapalogs are present to recruit the FRB or FKBP-fused caspase to the scaffold. In these methods, the FRB or FKBP polypeptides must be present as a multimeric unit not as monomers to drive FKBP- or FRB-caspase dimerization (except when FRB-Caspase-9 is dimerized with FKBP-Caspase-9). The FRB or FKBP-based scaffold can be expressed in a targeted cell as a fusion with other proteins and retains its capacity to serve as a scaffold to assemble and activate proapoptotic molecules. The FRB or FKBP scaffold may be localized within the cytosol as a soluble entity or present in specific subcellular locales, such as the plasma membrane through targeting signals. The components used to activate apoptosis and the downstream components that degrade the cell are shared by all cells and across species. With regard to Caspase-9 activation, these methods can be broadly utilized in cell lines, in normal primary cells, such as, for example, but not limited to, T cells, or in cell implants.

[0106] In certain examples of the direct dimerization of FRB-Caspase with FKBP-Caspase with rapamycin to direct apoptosis, it was shown that FKBP-fused Caspases can be dimerized by homodimerizer molecules, such as AP1510, AP20187 or AP1903 (FIG. 6 (right panel), 10A (schematic) (A similar proapototic switch can be directed via heterodimerization of a binary switch using rapamycin or rapalogs by coexpression of a FRB-Caspase-9 fusion protein along with FKBP-Caspase-9, leading to homodimerization of the caspase domains within the chimeric proteins (FIG. 8A (schematic), 10B (schematic), (11).

[0107] As used herein, the use of the word “a” or “an” when used in conjunction with the term “comprising” in the claims and/or the specification may mean “one,” but it is also consistent with the meaning of “one or more,” “at least one,” and “one or more than one.” Still further, the terms “having”, “including”, “containing” and “comprising” are interchangeable and one of skill in the art is cognizant that these terms are open ended terms.

[0108] The term “allogeneic” as used herein, refers to HLA or MHC loci that are antigenically distinct.

[0109] Thus, cells or tissue transferred from the same species can be antigenically distinct. Syngeneic mice can differ at one or more loci (congenics) and allogeneic mice can have the same background.

[0110] The term “antigen” as used herein is defined as a molecule that provokes an immune response. This immune response may involve either antibody production, or the activation of specific immunologically-competent cells, or both.

[0111] An “antigen recognition moiety” may be any polypeptide or fragment thereof, such as, for example, an antibody fragment variable domain, either naturally-derived, or synthetic, which binds to an antigen. Examples of antigen recognition moieties include, but are not limited to, polypeptides derived from antibodies, such as, for example, single-chain variable fragments (scFv), Fab, Fab′, F(ab′)2, and Fv fragments; polypeptides derived from T Cell receptors, such as, for example, TCR variable domains; and any ligand or receptor fragment that binds to the extracellular cognate protein.

[0112] The term “cancer” as used herein is defined as a hyperproliferation of cells whose unique trait—loss of normal controls—results in unregulated growth, lack of differentiation, local tissue invasion, and metastasis. Examples include but are not limited to, melanoma, non-small cell lung, small-cell lung, lung, hepatocarcinoma, leukemia, retinoblastoma, astrocytoma, glioblastoma, gum, tongue, neuroblastoma, head, neck, breast, pancreatic, prostate, renal, bone, testicular, ovarian, mesothelioma, cervical, gastrointestinal, lymphoma, brain, colon, sarcoma or bladder.

[0113] Donor: The term “donor” refers to a mammal, for example, a human, that is not the patient recipient. The donor may, for example, have HLA identity with the recipient, or may have partial or greater HLA disparity with the recipient.

[0114] Haploidentical: The term “haploidentical” as used with reference to cells, cell types and/or cell lineages, herein refers to cells sharing a haplotype or cells having substantially the same alleles at a set of closely linked genes on one chromosome. A haploidentical donor does not have complete HLA identity with the recipient, there is a partial HLA disparity.

[0115] Blood disease: The terms “blood disease”, “blood disease” and/or “diseases of the blood” as used herein, refers to conditions that affect the production of blood and its components, including but not limited to, blood cells, hemoglobin, blood proteins, the mechanism of coagulation, production of blood, production of blood proteins, the like and combinations thereof. Non-limiting examples of blood diseases include anemias, leukemias, lymphomas, hematological neoplasms, albuminemias, haemophilias and the like.

[0116] Bone marrow disease: The term “bone marrow disease” as used herein, refers to conditions leading to a decrease in the production of blood cells and blood platelets. In some bone marrow diseases, normal bone marrow architecture can be displaced by infections (e.g., tuberculosis) or malignancies, which in turn can lead to the decrease in production of blood cells and blood platelets. Non-limiting examples of bone marrow diseases include leukemias, bacterial infections (e.g., tuberculosis), radiation sickness or poisoning, apnocytopenia, anemia, multiple myeloma and the like.

[0117] T cells and Activated T cells (include that this means CD3+ cells): T cells (also referred to as T lymphocytes) belong to a group of white blood cells referred to as lymphocytes. Lymphocytes generally are involved in cell-mediated immunity. The “T” in “T cells” refers to cells derived from or whose maturation is influenced by the thymus. T cells can be distinguished from other lymphocytes types such as B cells and Natural Killer (NK) cells by the presence of cell surface proteins known as T cell receptors. The term “activated T cells” as used herein, refers to T cells that have been stimulated to produce an immune response (e.g., clonal expansion of activated T cells) by recognition of an antigenic determinant presented in the context of a Class II major histocompatibility (MHC) marker. T-cells are activated by the presence of an antigenic determinant, cytokines and/or lymphokines and cluster of differentiation cell surface proteins (e.g., CD3, CD4, CD8, the like and combinations thereof). Cells that express a cluster of differential protein often are said to be “positive” for expression of that protein on the surface of T-cells (e.g., cells positive for CD3 or CD 4 expression are referred to as CD3⁺ or CD4⁺). CD3 and CD4 proteins are cell surface receptors or co-receptors that may be directly and/or indirectly involved in signal transduction in T cells.

[0118] Peripheral blood: The term “peripheral blood” as used herein, refers to cellular components of blood (e.g., red blood cells, white blood cells and platelets), which are obtained or prepared from the circulating pool of blood and not sequestered within the lymphatic system, spleen, liver or bone marrow.

[0119] Umbilical cord blood: Umbilical cord blood is distinct from peripheral blood and blood sequestered within the lymphatic system, spleen, liver or bone marrow. The terms “umbilical cord blood”, “umbilical blood” or “cord blood”, which can be used interchangeably, refers to blood that remains in the placenta and in the attached umbilical cord after child birth. Cord blood often contains stem cells including hematopoietic cells.

[0120] By “cytoplasmic CD40” or “CD40 lacking the CD40 extracellular domain” is meant a CD40 polypeptide that lacks the CD40 extracellular domain. In some examples, the terms also refer to a CD40 polypeptide that lacks both the CD40 extracellular domain and a portion of, or all of, the CD40 transmembrane domain.

[0121] By “obtained or prepared” as, for example, in the case of cells, is meant that the cells or cell culture are isolated, purified, or partially purified from the source, where the source may be, for example, umbilical cord blood, bone marrow, or peripheral blood. The terms may also apply to the case where the original source, or a cell culture, has been cultured and the cells have replicated, and where the progeny cells are now derived from the original source.

[0122] By “kill” or “killing” as in a percent of cells killed, is meant the death of a cell through apoptosis, as measured using any method known for measuring apoptosis, and, for example, using the assays discussed herein, such as, for example the SEAP assays or T cell assays discussed herein. The term may also refer to cell ablation.

[0123] Allodepletion: The term “allodepletion” as used herein, refers to the selective depletion of alloreactive T cells. The term “alloreactive T cells” as used herein, refers to T cells activated to produce an immune response in reaction to exposure to foreign cells, such as, for example, in a transplanted allograft. The selective depletion generally involves targeting various cell surface expressed markers or proteins, (e.g., sometimes cluster of differentiation proteins (CD proteins), CD19, or the like), for removal using immunomagnets, immunotoxins, flow sorting, induction of apoptosis, photodepletion techniques, the like or combinations thereof. In the present methods, the cells may be transduced or transfected with the chimeric protein-encoding vector before or after allodepletion. Also, the cells may be transduced or transfected with the chimeric protein-encoding vector without an allodepletion step, and the non-allodepleted cells may be administered to the patient. Because of the added “safety switch” it is, for example, possible to administer the non-allo-depleted (or only partially allo-depleted) T cells because an adverse event such as, for example, graft versus host disease, may be alleviated upon the administration of the multimeric ligand.

[0124] Graft versus host disease: The terms “graft versus host disease” or “GvHD”, refer to a complication often associated with allogeneic bone marrow transplantation and sometimes associated with transfusions of un-irradiated blood to immunocompromised patients. Graft versus host disease sometimes can occur when functional immune cells in the transplanted marrow recognize the recipient as “foreign” and mount an immunologic response. GvHD can be divided into an acute form and a chronic form. Acute GVHD (aGVHD) often is observed within the first 100 days following transplant or transfusion and can affect the liver, skin, mucosa, immune system (e.g., the hematopoietic system, bone marrow, thymus, and the like), lungs and gastrointestinal tract. Chronic GVHD (cGVHD) often begins 100 days or later post transplant or transfusion and can attack the same organs as acute GvHD, but also can affect connective tissue and exocrine glands. Acute GvHD of the skin can result in a diffuse maculopapular rash, sometimes in a lacy pattern.

[0125] Donor T cell: The term “donor T cell” as used here refers to T cells that often are administered to a recipient to confer anti-viral and/or anti-tumor immunity following allogeneic stem cell transplantation. Donor T cells often are utilized to inhibit marrow graft rejection and increase the success of alloengraftment, however the same donor T cells can cause an alloaggressive response against host antigens, which in turn can result in graft versus host disease (GVHD). Certain activated donor T cells can cause a higher or lower GvHD response than other activated T cells. Donor T cells may also be reactive against recipient tumor cells, causing a beneficial graft vs. tumor effect.

[0126] Mesenchymal stromal cell: The terms “mesenchymal stromal cell” or “bone marrow derived mesenchymal stromal cell” as used herein, refer to multipotent stem cells that can differentiate ex vivo, in vitro and in vivo into adipocytes, osteoblasts and chondroblasts, and may be further defined as a fraction of mononuclear bone marrow cells that adhere to plastic culture dishes in standard culture conditions, are negative for hematopoietic lineage markers and are positive for CD73, CD90 and CD105.

[0127] Embryonic stem cell: The term “embryonic stem cell” as used herein, refers to pluripotent stem cells derived from the inner cell mass of the blastocyst, an early-stage embryo of between 50 to 150 cells. Embryonic stem cells are characterized by their ability to renew themselves indefinitely and by their ability to differentiate into derivatives of all three primary germ layers, ectoderm, endoderm and mesoderm. Pluripotent is distinguished from mutipotent in that pluripotent cells can generate all cell types, while multipotent cells (e.g., adult stem cells) can only produce a limited number of cell types.

[0128] Inducible pluripotent stem cell: The terms “inducible pluripotent stem cell” or “induced pluripotent stem cell” as used herein refers to adult, or differentiated cells, that are “reprogrammed” or induced by genetic (e.g., expression of genes that in turn activates pluripotency), biological (e.g., treatment viruses or retroviruses) and/or chemical (e.g., small molecules, peptides and the like) manipulation to generate cells that are capable of differentiating into many if not all cell types, like embryonic stem cells. Inducible pluripotent stem cells are distinguished from embryonic stem cells in that they achieve an intermediate or terminally differentiated state (e.g., skin cells, bone cells, fibroblasts, and the like) and then are induced to dedifferentiate, thereby regaining some or all of the ability to generate multipotent or pluripotent cells.

[0129] CD34⁺ cell: The term “CD34⁺ cell” as used herein refers to a cell expressing the CD34 protein on its cell surface. “CD34” as used herein refers to a cell surface glycoprotein (e.g., sialomucin protein) that often acts as a cell-cell adhesion factor and is involved in T cell entrance into lymph nodes, and is a member of the “cluster of differentiation” gene family. CD34 also may mediate the attachment of stem cells to bone marrow, extracellular matrix or directly to stromal cells. CD34⁺ cells often are found in the umbilical cord and bone marrow as hematopoietic cells, a subset of mesenchymal stem cells, endothelial progenitor cells, endothelial cells of blood vessels but not lymphatics (except pleural lymphatics), mast cells, a sub-population of dendritic cells (which are factor XIIIa negative) in the interstitium and around the adnexa of dermis of skin, as well as cells in certain soft tissue tumors (e.g., alveolar soft part sarcoma, pre-B acute lymphoblastic leukemia (Pre-B-ALL), acute myelogenous leukemia (AML), AML-M7, dermatofibrosarcoma protuberans, gastrointestinal stromal tumors, giant cell fibroblastoma, granulocytic sarcoma, Kaposi's sarcoma, liposarcoma, malignant fibrous histiocytoma, malignant peripheral nerve sheath tumors, mengingeal hemangiopericytomas, meningiomas, neurofibromas, schwannomas, and papillary thyroid carcinoma).

[0130] Gene expression vector: The terms “gene expression vector”, “nucleic acid expression vector”, or “expression vector” as used herein, which can be used interchangeably throughout the document, generally refers to a nucleic acid molecule (e.g., a plasmid, phage, autonomously replicating sequence (ARS), artificial chromosome, yeast artificial chromosome (e.g., YAC)) that can be replicated in a host cell and be utilized to introduce a gene or genes into a host cell. The genes introduced on the expression vector can be endogenous genes (e.g., a gene normally found in the host cell or organism) or heterologous genes (e.g., genes not normally found in the genome or on extra-chromosomal nucleic acids of the host cell or organism). The genes introduced into a cell by an expression vector can be native genes or genes that have been modified or engineered. The gene expression vector also can be engineered to contain 5′ and 3′ untranslated regulatory sequences that sometimes can function as enhancer sequences, promoter regions and/or terminator sequences that can facilitate or enhance efficient transcription of the gene or genes carried on the expression vector. A gene expression vector sometimes also is engineered for replication and/or expression functionality (e.g., transcription and translation) in a particular cell type, cell location, or tissue type. Expression vectors sometimes include a selectable marker for maintenance of the vector in the host or recipient cell.

[0131] Developmentally regulated promoter: The term “developmentally regulated promoter” as used herein refers to a promoter that acts as the initial binding site for RNA polymerase to transcribe a gene which is expressed under certain conditions that are controlled, initiated by or influenced by a developmental program or pathway. Developmentally regulated promoters often have additional control regions at or near the promoter region for binding activators or repressors of transcription that can influence transcription of a gene that is part of a development program or pathway. Developmentally regulated promoters sometimes are involved in transcribing genes whose gene products influence the developmental differentiation of cells.

[0132] Developmentally differentiated cells: The term “developmentally differentiated cells”, as used herein refers to cells that have undergone a process, often involving expression of specific developmentally regulated genes, by which the cell evolves from a less specialized form to a more specialized form in order to perform a specific function. Non-limiting examples of developmentally differentiated cells are liver cells, lung cells, skin cells, nerve cells, blood cells, and the like. Changes in developmental differentiation generally involve changes in gene expression (e.g., changes in patterns of gene expression), genetic re-organization (e.g., remodeling or chromatin to hide or expose genes that will be silenced or expressed, respectively), and occasionally involve changes in DNA sequences (e.g., immune diversity differentiation). Cellular differentiation during development can be understood as the result of a gene regulatory network. A regulatory gene and its cis-regulatory modules are nodes in a gene regulatory network that receive input (e.g., protein expressed upstream in a development pathway or program) and create output elsewhere in the network (e.g., the expressed gene product acts on other genes downstream in the developmental pathway or program).

[0133] The terms “cell,” “cell line,” and “cell culture” as used herein may be used interchangeably. All of these terms also include their progeny, which are any and all subsequent generations. It is understood that all progeny may not be identical due to deliberate or inadvertent mutations.

[0134] As used here, the term “rapalog” is meant as an analog of the natural antibiotic rapamycin. Certain rapalogs in the present embodiments have properties such as stability in serum, a poor affinity to wildtype FRB (and hence the parent protein, mTOR, leading to reduction or elimination of immunosuppressive properties), and a relatively high affinity to a mutant FRB domain. For commercial purposes, in certain embodiments, the rapalogs have useful scaling and production properties. Examples of rapalogs include, but are not limited to, S-o,p-dimethoxyphenyl (DMOP)-rapamycin: EC₅₀ (wt FRB (K2095 T2098 W2101)˜1000 nM), EC₅₀ (FRB-KLW ˜5 nM) Luengo J I (95) Chem & Biol 2:471-81; Luengo J I (94) J. Org Chem 59:6512-6513; U.S. Pat. No. 6,187,757; R-Isopropoxyrapamycin: EC₅₀ (wt FRB (K2095 T2098 W2101)˜300 nM), EC50 (FRB-PLF ˜8.5 nM); Liberles S (97) PNAS 94: 7825-30; and S-Butanesulfonamidorap (AP23050): EC₅₀ (wt FRB (K2095 T2098 W2101)˜2.7 nM), EC₅₀ (FRB-KTF ˜>200 nM) Bayle (06) Chem & Bio. 13: 99-107.

[0135] The term “FRB” refers to the FKBP12-Rapamycin-Binding (FRB) domain (residues 2015-2114 encoded within mTOR), and analogs thereof. In certain embodiments, FRB variants are provided. The properties of an FRB variant are stability (some variants are more labile than others) and ability to bind to various rapalogs. Based on the crystal structure conjugated to rapamcyin, there are 3 key rapamycin-interacting residues that have been most analyzed, K2095, T2098, and W2101. Mutation of all three leads to an unstable protein that can be stabilized in the presence of rapamycin or some rapalogs. This feature can be used to further increase the signal:noise ratio in some applications. Examples of mutants are discussed in Bayle et al (06) Chem & Bio 13: 99-107; Stankunas et al (07) Chembiochem 8:1162-1169; and Liberles S (97) PNAS 94:7825-30). Examples of FRB regions of the present embodiments include, but are not limited to, KLW (with L2098); KTF (with F2101); and KLF (L2098, F2101).

[0136] Each ligand can include two or more portions (e.g., defined portions, distinct portions), and sometimes includes two, three, four, five, six, seven, eight, nine, ten, or more portions. The first ligand and second ligand each, independently, can consist of two portions (i.e., dimer), consist of three portions (i.e., trimer) or consist of four portions (i.e., tetramer). The first ligand sometimes includes a first portion and a second portion and the second ligand sometimes includes a third portion and a fourth portion. The first portion and the second portion often are different (i.e., heterogeneous (e.g., heterodimer)), the first portion and the third portion sometimes are different and sometimes are the same, and the third portion and the fourth portion often are the same (i.e., homogeneous (e.g., homodimer)). Portions that are different sometimes have a different function (e.g., bind to the first multimerizing region, bind to the second multimerizing region, do not significantly bind to the first multimerizing region, do not significantly bind to the second multimerizing region (e.g., the first portion binds to the first multimerizing region but does not significantly bind to the second multimerizing region) and sometimes have a different chemical structure. Portions that are different sometimes have a different chemical structure but can bind to the same multimerizing region (e.g., the second portion and the third portion can bind to the second multimerizing region but can have different structures). The first portion sometimes binds to the first multimerizing region and sometimes does not bind significantly to the second multimerizing region. Each portion sometimes is referred to as a “monomer” (e.g., first monomer, second monomer, third monomer and fourth monomer that tracks the first portion, second portion, third portion and fourth portion, respectively). Each portion sometimes is referred to as a “side.” Sides of a ligand may sometimes be adjacent to each other, and may sometimes be located at opposing locations on a ligand.

[0137] By being “capable of binding”, as in the example of a multimeric or heterodimeric ligand binding to a multimerizing region or ligand binding region is meant that the ligand binds to the ligand binding region, for example, a portion, or portions, of the ligand bind to the multimerizing region, and that this binding may be detected by an assay method including, but not limited to, a biological assay, a chemical assay, or physical means of detection such as, for example, x-ray crystallography. In addition, where a ligand is considered to “not significantly bind” is meant that there may be minor detection of binding of a ligand to the ligand binding region, but that this amount of binding, or the stability of binding is not significantly detectable, and, when occurring in the cells of the present embodiment, does not activate the modified cell or cause apoptosis. In certain examples, where the ligand does not “significantly bind,” upon administration of the ligand, the amount of cells undergoing apoptosis is less than 10, 5, 4, 3, 2, or 1%.

[0138] The multimerizing regions, such as the FRB or FKBP12 multimerizing regions, may be located amino terminal to the pro-apoptotic polypeptide, may be located carboxyl terminal to the pro-apoptotic polypeptide. Additional polypeptides, such as, for example, linker polypeptides, stem polypeptides, spacer polypeptides, or in some examples, marker polypeptides, may be located between the multimerizing region and the pro-apoptotic polypeptide.

[0139] By “region” or “domain” is meant a polypeptide, or fragment thereof, that maintains the function of the polypeptide as it relates to the chimeric polypeptides of the present application. That is, for example, an FKBP12 binding domain, FKBP12 domain, FKBP12 region, FKBP12 multimerizing region, and the like, refer to an FKBP12 polypeptide that binds to the CID ligand, such as, for example, rimiducid, or rapamycin, to cause, or allow for, dimerization or multimerization of the chimeric polypeptide. By “region” or “domain” of a pro-apoptotic polypeptide, for example, the Caspase-9 polypeptides or truncated Caspase-9 polypeptides of the present applications, is meant that upon dimerization or multimerization of the Caspase-9 region as part of the chimeric polypeptide, or chimeric pro-apoptotic polypeptide, the dimerized or multimerized chimeric polypeptide can participate in the caspase cascade, allowing for, or causing, apoptosis.

[0140] FKBP12 variants may also be used in the FKBP12 or FRB multimerizing regions. Examples of FKBP12 variants include those from many species, including, for example, yeast. In one embodiment, the FKBP12 variant is FKBP12.6 (calstablin).

[0141] Other heterodimers are contemplated in the present application. In one embodiment, a calcineurin-A polypeptide, or region may be used in place of the FRB multimerizing region. In these embodiments, the first ligand comprises, for example, cyclosporine.

[0142] As used herein, the term “iCaspase-9” molecule, polypeptide, or protein is defined as an inducible Caspase-9. The term “iCaspase-9” embraces iCaspase-9 nucleic acids, iCaspase-9 polypeptides and/or iCaspase-9 expression vectors. The term also encompasses either the natural iCaspase-9 nucleotide or amino acid sequence, or a truncated sequence that is lacking the CARD domain.

[0143] As used herein, the term “iCaspase 1 molecule”, “iCaspase 3 molecule”, or “iCaspase 8 molecule” is defined as an inducible Caspase 1, 3, or 8, respectively. The term iCaspase 1, iCaspase 3, or iCaspase 8, embraces iCaspase 1, 3, or 8 nucleic acids, iCaspase 1, 3, or 8 polypeptides and/or iCaspase 1, 3, or 8 expression vectors, respectively. The term also encompasses either the natural CaspaseiCaspase-1, -3, or -8 nucleotide or amino acid sequence, respectively, or a truncated sequence that is lacking the CARD domain. By “wild type” Caspase-9 in the context of the experimental details provided herein, is meant the Caspase-9 molecule lacking the CARD domain.

[0144] Modified Caspase-9 polypeptides comprise at least one amino acid substitution that affects basal activity or IC₅₀, in a chimeric polypeptide comprising the modified Caspase-9 polypeptide. Methods for testing basal activity and IC₅₀ are discussed herein. Non-modified Caspase-9 polypeptides do not comprise this type of amino acid substitution. Both modified and non-modified Caspase-9 polypeptides may be truncated, for example, to remove the CARD domain.

[0145] “Function-conservative variants” are proteins or enzymes in which a given amino acid residue has been changed without altering overall conformation and function of the protein or enzyme, including, but not limited to, replacement of an amino acid with one having similar properties, including polar or non-polar character, size, shape and charge. Conservative amino acid substitutions for many of the commonly known non-genetically encoded amino acids are well known in the art. Conservative substitutions for other non-encoded amino acids can be determined based on their physical properties as compared to the properties of the genetically encoded amino acids.

[0146] Amino acids other than those indicated as conserved may differ in a protein or enzyme so that the percent protein or amino acid sequence similarity between any two proteins of similar function may vary and can be, for example, at least 70%, at least 80%, at least 90%, and at least 95%, as determined according to an alignment scheme. As referred to herein, “sequence similarity” means the extent to which nucleotide or protein sequences are related. The extent of similarity between two sequences can be based on percent sequence identity and/or conservation. “Sequence identity” herein means the extent to which two nucleotide or amino acid sequences are invariant. “Sequence alignment” means the process of lining up two or more sequences to achieve maximal levels of identity (and, in the case of amino acid sequences, conservation) for the purpose of assessing the degree of similarity. Numerous methods for aligning sequences and assessing similarity/identity are known in the art such as, for example, the Cluster Method, wherein similarity is based on the MEGALIGN algorithm, as well as BLASTN, BLASTP, and FASTA. When using any of these programs, the settings may be selected that result in the highest sequence similarity.

[0147] The amino acid residue numbers referred to herein reflect the amino acid position in the non-truncated and non-modified Caspase-9 polypeptide, for example, that of SEQ ID NO: 9. SEQ ID NO: 9 provides an amino acid sequence for the truncated Caspase-9 polypeptide, which does not include the CARD domain. Thus SEQ ID NO: 9 commences at amino acid residue number 135, and ends at amino acid residue number 416, with reference to the full length Caspase-9 amino acid sequence. Those of ordinary skill in the art may align the sequence with other sequences of Caspase-9 polypeptides to, if desired, correlate the amino acid residue number, for example, using the sequence alignment methods discussed herein.

[0148] As used herein, the term “cDNA” is intended to refer to DNA prepared using messenger RNA (mRNA) as template. The advantage of using a cDNA, as opposed to genomic DNA or DNA polymerized from a genomic, non- or partially-processed RNA template, is that the cDNA primarily contains coding sequences of the corresponding protein. There are times when the full or partial genomic sequence is used, such as where the non-coding regions are required for optimal expression or where non-coding regions such as introns are to be targeted in an antisense strategy.

[0149] As used herein, the term “expression construct” or “transgene” is defined as any type of genetic construct containing a nucleic acid coding for gene products in which part or all of the nucleic acid encoding sequence is capable of being transcribed can be inserted into the vector. The transcript is translated into a protein, but it need not be. In certain embodiments, expression includes both transcription of a gene and translation of mRNA into a gene product. In other embodiments, expression only includes transcription of the nucleic acid encoding genes of interest. The term “therapeutic construct” may also be used to refer to the expression construct or transgene. The expression construct or transgene may be used, for example, as a therapy to treat hyperproliferative diseases or disorders, such as cancer, thus the expression construct or transgene is a therapeutic construct or a prophylactic construct.

[0150] As used herein, the term “expression vector” refers to a vector containing a nucleic acid sequence coding for at least part of a gene product capable of being transcribed. In some cases, RNA molecules are then translated into a protein, polypeptide, or peptide. In other cases, these sequences are not translated, for example, in the production of antisense molecules or ribozymes. Expression vectors can contain a variety of control sequences, which refer to nucleic acid sequences necessary for the transcription and possibly translation of an operatively linked coding sequence in a particular host organism. In addition to control sequences that govern transcription and translation, vectors and expression vectors may contain nucleic acid sequences that serve other functions as well and are discussed infra.

[0151] As used herein, the term “ex vivo” refers to “outside” the body. The terms “ex vivo” and “in vitro” can be used interchangeably herein.

[0152] As used herein, the term “functionally equivalent,” as it relates to Caspase-9, or truncated Caspase-9, for example, refers to a Caspase-9 nucleic acid fragment, variant, or analog, refers to a nucleic acid that codes for a Caspase-9 polypeptide, or a Caspase-9 polypeptide, that stimulates an apoptotic response. “Functionally equivalent” refers, for example, to a Caspase-9 polypeptide that is lacking the CARD domain, but is capable of inducing an apoptotic cell response. When the term “functionally equivalent” is applied to other nucleic acids or polypeptides, such as, for example, CD19, the 5′LTR, the multimeric ligand binding region, or CD3, it refers to fragments, variants, and the like that have the same or similar activity as the reference polypeptides of the methods herein.

[0153] As used herein, the term “gene” is defined as a functional protein, polypeptide, or peptide-encoding unit. As will be understood, this functional term includes genomic sequences, cDNA sequences, and smaller engineered gene segments that express, or are adapted to express, proteins, polypeptides, domains, peptides, fusion proteins, and mutants.

[0154] The term “hyperproliferative disease” is defined as a disease that results from a hyperproliferation of cells. Exemplary hyperproliferative diseases include, but are not limited to cancer or autoimmune diseases. Other hyperproliferative diseases may include vascular occlusion, restenosis, atherosclerosis, or inflammatory bowel disease.

[0155] The term “immunogenic composition” or “immunogen” refers to a substance that is capable of provoking an immune response. Examples of immunogens include, e.g., antigens, autoantigens that play a role in induction of autoimmune diseases, and tumor-associated antigens expressed on cancer cells.

[0156] The term “immunocompromised” as used herein is defined as a subject that has reduced or weakened immune system. The immunocompromised condition may be due to a defect or dysfunction of the immune system or to other factors that heighten susceptibility to infection and/or disease. Although such a categorization allows a conceptual basis for evaluation, immunocompromised individuals often do not fit completely into one group or the other. More than one defect in the body's defense mechanisms may be affected. For example, individuals with a specific T-lymphocyte defect caused by HIV may also have neutropenia caused by drugs used for antiviral therapy or be immunocompromised because of a breach of the integrity of the skin and mucous membranes. An immunocompromised state can result from indwelling central lines or other types of impairment due to intravenous drug abuse; or be caused by secondary malignancy, malnutrition, or having been infected with other infectious agents such as tuberculosis or sexually transmitted diseases, e.g., syphilis or hepatitis.

[0157] As used herein, the term “pharmaceutically or pharmacologically acceptable” refers to molecular entities and compositions that do not produce adverse, allergic, or other untoward reactions when administered to an animal or a human.

[0158] As used herein, “pharmaceutically acceptable carrier” includes any and all solvents, dispersion media, coatings, antibacterial and antifungal agents, isotonic and absorption delaying agents and the like. The use of such media and agents for pharmaceutically active substances is well known in the art. Except insofar as any conventional media or agent is incompatible with the vectors or cells presented herein, its use in therapeutic compositions is contemplated. Supplementary active ingredients also can be incorporated into the compositions.

[0159] As used herein, the term “polynucleotide” is defined as a chain of nucleotides. Furthermore, nucleic acids are polymers of nucleotides. Thus, nucleic acids and polynucleotides as used herein are interchangeable. Nucleic acids are polynucleotides, which can be hydrolyzed into the monomeric “nucleotides.” The monomeric nucleotides can be hydrolyzed into nucleosides. As used herein polynucleotides include, but are not limited to, all nucleic acid sequences which are obtained by any means available in the art, including, without limitation, recombinant means, i.e., the cloning of nucleic acid sequences from a recombinant library or a cell genome, using ordinary cloning technology and PORT™, and the like, and by synthetic means. Furthermore, polynucleotides include mutations of the polynucleotides, include but are not limited to, mutation of the nucleotides, or nucleosides by methods well known in the art. A nucleic acid may comprise one or more polynucleotides.

[0160] As used herein, the term “polypeptide” is defined as a chain of amino acid residues, usually having a defined sequence. As used herein the term polypeptide is interchangeable with the terms “peptides” and “proteins”.

[0161] As used herein, the term “promoter” is defined as a DNA sequence recognized by the synthetic machinery of the cell, or introduced synthetic machinery, required to initiate the specific transcription of a gene.

[0162] The term “transfection” and “transduction” are interchangeable and refer to the process by which an exogenous DNA sequence is introduced into a eukaryotic host cell. Transfection (or transduction) can be achieved by any one of a number of means including electroporation, microinjection, gene gun delivery, retroviral infection, lipofection, superfection and the like.

[0163] As used herein, the term “syngeneic” refers to cells, tissues or animals that have genotypes that are identical or closely related enough to allow tissue transplant, or are immunologically compatible. For example, identical twins or animals of the same inbred strain. Syngeneic and isogeneic can be used interchangeably.

[0164] The terms “patient” or “subject” are interchangeable, and, as used herein include, but are not limited to, an organism or animal; a mammal, including, e.g., a human, non-human primate (e.g., monkey), mouse, pig, cow, goat, rabbit, rat, guinea pig, hamster, horse, monkey, sheep, or other non-human mammal; a non-mammal, including, e.g., a non-mammalian vertebrate, such as a bird (e.g., a chicken or duck) or a fish, and a non-mammalian invertebrate.

[0165] By “T cell activation molecule” is meant a polypeptide that, when incorporated into a T cell expressing a chimeric antigen receptor, enhances activation of the T cell. Examples include, but are not limited to, ITAM-containing, Signal 1 conferring molecules such as, for example, CD3 ζ polypeptide, and Fc receptor gamma, such as, for example, Fc epsilon receptor gamma (FcεR1γ) subunit (Haynes, N. M., et al. J. Immunol. 166:182-7 (2001)). J. Immunology).

[0166] As used herein, the term “under transcriptional control” or “operatively linked” is defined as the promoter is in the correct location and orientation in relation to the nucleic acid to control RNA polymerase initiation and expression of the gene.

[0167] As used herein, the terms “treatment”, “treat”, “treated”, or “treating” refer to prophylaxis and/or therapy.

[0168] As used herein, the term “vaccine” refers to a formulation that contains a composition presented herein which is in a form that is capable of being administered to an animal. Typically, the vaccine comprises a conventional saline or buffered aqueous solution medium in which the composition is suspended or dissolved. In this form, the composition can be used conveniently to prevent, ameliorate, or otherwise treat a condition. Upon introduction into a subject, the vaccine is able to provoke an immune response including, but not limited to, the production of antibodies, cytokines and/or other cellular responses.

[0169] In some embodiments, the nucleic acid is contained within a viral vector. In certain embodiments, the viral vector is a retroviral vector. In certain embodiments, the viral vector is an adenoviral vector or a lentiviral vector. It is understood that in some embodiments, the antigen-presenting cell is contacted with the viral vector ex vivo, and in some embodiments, the antigen-presenting cell is contacted with the viral vector in vivo.

### Hematopoietic Stem Cells and Cell Therapy

[0170] Hematopoietic stem cells include hematopoietic progenitor cells, immature, multipotent cells that can differentiate into mature blood cell types. These stem cells and progenitor cells may be isolated from bone marrow and umbilical cord blood, and, in some cases, from peripheral blood. Other stem and progenitor cells include, for example, mesenchymal stromal cells, embryonic stem cells, and inducible pluripotent stem cells.

[0171] Bone marrow derived mesenchymal stromal cells (MSCs) have been defined as a fraction of mononuclear bone marrow cells that adhere to plastic culture dishes in standard culture conditions, are negative for hematopoietic lineage markers and positive for CD73, CD90 and CD105, and able to differentiate in vitro into adipocytes, osteoblasts, and chondroblasts. While one physiologic role is presumed to be the support of hematopoiesis, several reports have also established that MSCs are able to incorporate and possibly proliferate in areas of active growth, such as cicatricial and neoplastic tissues, and to home to their native microenvironment and replace the function of diseased cells. Their differentiation potential and homing ability make MSCs attractive vehicles for cellular therapy, either in their native form for regenerative applications, or through their genetic modification for delivery of active biological agents to specific microenvironments such as diseased bone marrow or metastatic deposits. In addition, MSCs possess potent intrinsic immunosuppressive activity, and to date have found their most frequent application in the experimental treatment of graft-versus-host disease and autoimmune disorders (Pittenger, M. F., et al. (1999). Science 284: 143-147; Dominici, M., et al. (2006). Cytotherapy 8: 315-317; Prockop, D. J. (1997). Science 276: 71-74; Lee, R. H., et al. (2006). Proc Natl Acad Sci USA 103: 17438-17443; Studeny, M., et al., (2002). Cancer Res 62: 3603-3608; Studeny, M., et al. (2004). J Natl Cancer Inst 96: 1593-1603; Horwitz, E. M., et al. (1999). Nat Med 5: 309-313; Chamberlain, G., et al., (2007). Stem Cells 25: 2739-2749; Phinney, D. G., and Prockop, D. J. (2007). Stem Cells 25: 2896-2902; Horwitz, E. M., et al. (2002). Proc Natl Acad Sci USA 99: 8932-8937; Hall, B., et al., (2007). Int J Hematol 86: 8-16; Nauta, A. J., and Fibbe, W. E. (2007). Blood 110: 3499-3506; Le Blanc, K., et al. (2008). Lancet 371: 1579-1586; Tyndall, A., and Uccelli, A. (2009). Bone Marrow Transplant).

[0172] MSCs have been infused in hundreds of patients with minimal reported side effects. However, follow-up is limited, long term side effects are unknown, and little is known of the consequences that will be associated with future efforts to induce their in vivo differentiation, for example to cartilage or bone, or to genetically modify them to enhance their functionality. Several animal models have raised safety concerns. For instance, spontaneous osteosarcoma formation in culture has been observed in murine derived MSCs. Furthermore, ectopic ossification and calcification foci have been discussed in mouse and rat models of myocardial infarction after local injection of MSC, and their proarrhythmic potential has also been apparent in co-culture experiments with neonatal rat ventricular myocytes. Moreover, bilateral diffuse pulmonary ossification has been observed after bone marrow transplant in a dog, presumably due to the transplanted stromal components (Horwitz, E. M., et al., (2007). Biol Blood Marrow Transplant 13: 53-57; Tolar, J., et al. (2007). Stem Cells 25: 371-379; Yoon, Y.-S., et al., (2004). Circulation 109: 3154-3157; Breitbach, M., et al. (2007). Blood 110: 1362-1369; Chang, M. G., et al. (2006). Circulation 113: 1832-1841; Sale, G. E., and Storb, R. (1983). Exp Hematol 11: 961-966).

[0173] In another example of cell therapy, T cells transduced with a nucleic acid encoding a chimeric antigen receptor have been administered to patients to treat cancer (Zhong, X.-S., (2010) Molecular Therapy 18:413-420). Chimeric antigen receptors (CARs) are artificial receptors designed to convey antigen specificity to T cells without the requirement for MHC antigen presentation. They include an antigen-specific component, a transmembrane component, and an intracellular component selected to activate the T cell and provide specific immunity. Chimeric antigen receptor-expressing T cells may be used in various therapies, including cancer therapies. Costimulating polypeptides may be used to enhance the activation of CAR-expressing T cells against target antigens, and therefore increase the potency of adoptive immunotherapy.

[0174] For example, T cells expressing a chimeric antigen receptor based on the humanized monoclonal antibody Trastuzumab (Herceptin) has been used to treat cancer patients. Adverse events are possible, however, and in at least one reported case, the therapy had fatal consequences to the patient (Morgan, R. A., et al., (2010) Molecular Therapy 18:843-851). Transducing the cells with a chimeric Caspase-9-based safety switch as presented herein, would provide a safety switch that could stop the adverse event from progressing. Therefore, in some embodiments are provided nucleic acids, cells, and methods wherein the modified T cell also expresses an inducible Caspase-9 polypeptide. If there is a need, for example, to reduce the number of chimeric antigen receptor modified T cells, an inducible ligand may be administered to the patient, thereby inducing apoptosis of the modified T cells.

[0175] The antitumor efficacy from immunotherapy with T cells engineered to express chimeric antigen receptors (CARs) has steadily improved as CAR molecules have incorporated additional signaling domains to increase their potency. T cells transduced with first generation CARs, containing only the CD3ζ intracellular signaling molecule, have demonstrated poor persistence and expansion in vivo following adoptive transfer (Till B G, Jensen M C, Wang J, et al: CD20-specific adoptive immunotherapy for lymphoma using a chimeric antigen receptor with both CD28 and 4-1 BB domains: pilot clinical trial results. Blood 119:3940-50, 2012; Pule M A, Savoldo B, Myers G D, et al: Virus-specific T cells engineered to coexpress tumor-specific receptors: persistence and antitumor activity in individuals with neuroblastoma. Nat Med 14:1264-70, 2008; Kershaw M H, Westwood J A, Parker L L, et al: A phase 1 study on adoptive immunotherapy using gene-modified T cells for ovarian cancer. Clin Cancer Res 12:6106-15, 2006), as tumor cells often lack the requisite costimulating molecules necessary for complete T cell activation. Second generation CAR T cells were designed to improve proliferation and survival of the cells. Second generation CAR T cells that incorporate the intracellular costimulating domains from either CD28 or 4-1 BB (Carpenito C, Milone M C, Hassan R, et al: Control of large, established tumor xenografts with genetically retargeted human T cells containing CD28 and CD137 domains. Proc Natl Acad Sci USA 106:3360-5, 2009; Song D G, Ye Q, Poussin M, et al: CD27 costimulation augments the survival and antitumor activity of redirected human T cells in vivo. Blood 119:696-706, 2012), show improved survival and in vivo expansion following adoptive transfer, and more recent clinical trials using anti-CD19 CAR-modified T cells containing these costimulating molecules have shown remarkable efficacy for the treatment of CD19+ leukemia. (Kalos M, Levine B L, Porter D L, et al: T cells with chimeric antigen receptors have potent antitumor effects and can establish memory in patients with advanced leukemia. Sci Transl Med 3:95ra73, 2011; Porter D L, Levine B L, Kalos M, et al: Chimeric antigen receptor-modified T cells in chronic lymphoid leukemia. N Engl J Med 365:725-33, 2011; Brentjens R J, Davila M L, Riviere I, et al: CD19-targeted T cells rapidly induce molecular remissions in adults with chemotherapy-refractory acute lymphoblastic leukemia. Sci Transl Med 5:177ra38, 2013).

[0176] While others have explored additional signaling molecules from tumor necrosis factor (TNF)-family proteins, such as OX40 and 4-1BB, called “third generation” CAR T cells, (Finney H M, Akbar A N, Lawson A D: Activation of resting human primary T cells with chimeric receptors: costimulation from CD28, inducible costimulator, CD134, and CD137 in series with signals from the TCR zeta chain. J Immunol 172:104-13, 2004; Guedan S, Chen X, Madar A, et al: ICOS-based chimeric antigen receptors program bipolar TH17/TH1 cells. Blood, 2014), other molecules which induce T cell signaling distinct from the CD3ζ nuclear factor of activated T cells (NFAT) pathway may provide necessary costimulation for T cell survival and proliferation, and possibly endow CAR T cells with additional, valuable functions, not supplied by more conventional costimulating molecules. Some second and third-generation CAR T cells have been implicated in patient deaths, due to cytokine storm and tumor lysis syndrome caused by highly activated T cells.

[0177] By “chimeric antigen receptor” or “CAR” is meant, for example, a chimeric polypeptide which comprises a polypeptide sequence that recognizes a target antigen (an antigen-recognition domain) linked to a transmembrane polypeptide and intracellular domain polypeptide selected to activate the T cell and provide specific immunity. The antigen-recognition domain may be a single-chain variable fragment (ScFv), or may, for example, be derived from other molecules such as, for example, a T cell receptor or Pattern Recognition Receptor. The intracellular domain comprises at least one polypeptide which causes activation of the T cell, such as, for example, but not limited to, CD3 zeta, and, for example, co-stimulatory molecules, for example, but not limited to, CD28, OX40 and 4-1 BB. The term “chimeric antigen receptor” may also refer to chimeric receptors that are not derived from antibodies, but are chimeric T cell receptors. These chimeric T cell receptors may comprise a polypeptide sequence that recognizes a target antigen, where the recognition sequence may be, for example, but not limited to, the recognition sequence derived from a T cell receptor or an scFv. The intracellular domain polypeptides are those that act to activate the T cell. Chimeric T cell receptors are discussed in, for example, Gross, G., and Eshar, Z., FASEB Journal 6:3370-3378 (1992), and Zhang, Y., et al., PLOS Pathogens 6:1-13 (2010).

[0178] In one type of chimeric antigen receptor (CAR), the variable heavy (VH) and light (VL) chains for a tumor-specific monoclonal antibody are fused in-frame with the CD3 zeta chain (ζ) from the T cell receptor complex. The VH and VL are generally connected together using a flexible glycine-serine linker, and then attached to the transmembrane domain by a spacer (CH2CH3) to extend the scFv away from the cell surface so that it can interact with tumor antigens. Following transduction, T cells now express the CAR on their surface, and upon contact and ligation with a tumor antigen, signal through the CD3 zeta chain inducing cytotoxicity and cellular activation.

[0179] Investigators have noted that activation of T cells through CD3 zeta is sufficient to induce a tumor-specific killing, but is insufficient to induce T cell proliferation and survival. Early clinical trials using T cells modified with first generation CARs expressing only the zeta chain showed that gene-modified T cells exhibited poor survival and proliferation in vivo.

[0180] As co-stimulation through the B7 axis is necessary for complete T cell activation, investigators added the co-stimulating polypeptide CD28 signaling domain to the CAR construct. This region generally contains the transmembrane region (in place of the CD3 zeta version) and the YMNM motif for binding PI3K and Lck. In vivo comparisons between T cells expressing CARs with only zeta or CARs with both zeta and CD28 demonstrated that CD28 enhanced expansion in vivo, in part due to increased IL-2 production following activation. The inclusion of CD28 is called a 2nd generation CAR. The most commonly used costimulating molecules include CD28 and 4-1 BB, which, following tumor recognition, can initiate a signaling cascade resulting in NF-κB activation, which promotes both T cell proliferation and cell survival.

[0181] The use of co-stimulating polypeptides 4-1 BB or OX40 in CAR design has further improved T cell survival and efficacy. 4-1 BB in particular appears to greatly enhance T cell proliferation and survival. This 3rd generation design (with 3 signaling domains) has been used in PSMA CARs (Zhong X S, et al., Mol Ther. 2010 February; 18(2):413-20) and in CD19 CARs, most notably for the treatment of CLL (Milone, M. C., et al., (2009) Mol. Ther. 17:1453-1464; Kalos, M., et al., Sci. Transl. Med. (2011) 3:95ra73; Porter, D., et al., (2011) N. Engl. J. Med. 365: 725-533). These cells showed impressive function in 3 patients, expanding more than a 1000-fold in vivo, and resulted in sustained remission in all three patients.

[0182] It is understood that by “derived” is meant that the nucleotide sequence or amino acid sequence may be derived from the sequence of the molecule. The intracellular domain comprises at least one polypeptide which causes activation of the T cell, such as, for example, but not limited to, CD3 zeta, and, for example, co-stimulatory molecules, for example, but not limited to, CD28, OX40 and 4-1BB.

[0183] T cell receptors are molecules composed of two different polypeptides that are on the surface of T cells. They recognize antigens bound to major histocompatibility complex molecules; upon recognition with the antigen, the T cell is activated. By “recognize” is meant, for example, that the T cell receptor, or fragment or fragments thereof, such as TCRα polypeptide and TCRβ together, is capable of contacting the antigen and identifying it as a target. TCRs may comprise α and β polypeptides, or chains. The α and β polypeptides include two extracellular domains, the variable and the constant domains. The variable domain of the α and β polypeptides has three complementarity determining regions (CDRs); CDR3 is considered to be the main CDR responsible for recognizing the epitope. The α polypeptide includes the V and J regions, generated by VJ recombination, and the β polypeptide includes the V, D, and J regions, generated by VDJ recombination. The intersection of the VJ regions and VDJ regions corresponds to the CDR3 region. TCRs are often named using the International Immunogenetics (IMGT) TCR nomenclature (IMGT Database, www. IMGT.org; Giudicelli, V., et al., IMGT/LIGM-DB, the IMGT® comprehensive database of immunoglobulin and T cell receptor nucleotide sequences, Nucl. Acids Res., 34, D781-D784 (2006). PMID: 16381979; T cell Receptor Factsbook, LeFranc and LeFranc, Academic Press ISBN 0-12-441352-8).

[0184] Chimeric T cell receptors may bind to, for example, antigenic polypeptides such as Bob-1, PRAME, and NY-ESO-1. (U.S. patent application Ser. No. 14/930,572, filed Nov. 2, 2015, titled “T Cell Receptors Directed Against Bob1 and Uses Thereof,” and U.S. Provisional Patent Application No. 62/130,884, filed Mar. 10, 2015, titled “T Cell Receptors Directed Against the Preferentially-Expressed Antigen of Melanoma and Uses Thereof, each of which incorporated by reference in its entirety herein).

[0185] In another example of cell therapy, T cells are modified so that they express a non-functional TGF-beta receptor, rendering them resistant to TGF-beta. This allows the modified T cells to avoid the cytotoxicity caused by TGF-beta, and allows the cells to be used in cellular therapy (Bollard, C. J., et al., (2002) Blood 99:3179-3187; Bollard, C. M., et al., (2004) J. Exptl. Med. 200:1623-1633). However, it also could result in a T cell lymphoma, or other adverse effect, as the modified T cells now lack part of the normal cellular control; these therapeutic T cells could themselves become malignant. Transducing these modified T cells with a chimeric Caspase-9-based safety switch as presented herein, would provide a safety switch that could avoid this result.

[0186] In other examples, Natural Killer cells are modified to express the membrane-targeting polypeptide. Instead of a chimeric antigen receptor, in certain embodiments, the heterologous membrane bound polypeptide is a NKG2D receptor. NKG2D receptors can bind to stress proteins (e.g. MICA/B) on tumor cells and can thereby activate NK cells. The extracellular binding domain can also be fused to signaling domains (Barber, A., et al., Cancer Res 2007; 67: 5003-8; Barber A, et al., Exp Hematol. 2008; 36:1318-28; Zhang T., et al., Cancer Res. 2007; 67:11029-36, and this could, in turn, be linked to FRB domains, analogous to FRB-linkered CARs. Moreover, other cell surface receptors, such as VEGF-R could be used as a docking site for FRB domains to enhance tumor-dependent clustering in the presence of hypoxia-triggered VEGF, found at high levels within many tumors.

[0187] Cells used in cellular therapy, that express a heterologous gene, such as a modified receptor, or a chimeric receptor, may be transduced with nucleic acid that encodes a chimeric Caspase-9-based safety switch before, after, or at the same time, as the cells are transduced with the heterologous gene.

### Haploidentical Stem Cell Transplantation

[0188] While stem cell transplantation has proven an effective means of treating a wide variety of diseases involving hematopoietic stem cells and their progeny, a shortage of histocompatible donors has proved a major impediment to the widest application of the approach. The introduction of large panels of unrelated stem cell donors and or cord blood banks has helped to alleviate the problem, but many patients remain unsuited to either source. Even when a matched donor can be found, the elapsed time between commencing the search and collecting the stem cells usually exceeds three months, a delay that may doom many of the neediest patients. Hence there has been considerable interest in making use of HLA haploidentical family donors. Such donors may be parents, siblings or second-degree relatives. The problem of graft rejection may be overcome by a combination of appropriate conditioning and large doses of stem cells, while graft versus host disease (GvHD) may be prevented by extensive T cell-depletion of the donor graft. The immediate outcomes of such procedures have been gratifying, with engraftment rate >90% and a severe GvHD rate of <10% for both adults and children even in the absence of post transplant immunosuppression. Unfortunately the profound immunosuppression of the grafting procedure, coupled with the extensive T cell-depletion and HLA mismatching between donor and recipient lead to an extremely high rate of post-transplant infectious complications, and contributed to high incidence of disease relapse.

[0189] Donor T cell infusion is an effective strategy for conferring anti-viral and anti-tumor immunity following allogeneic stem cell transplantation. Simple addback of T cells to the patients after haploidentical transplantation, however, cannot work; the frequency of alloreactive T cells is several orders of magnitude higher than the frequency of, for example, virus specific T lymphocytes. Methods are being developed to accelerate immune reconstitution by administrating donor T cells that have first been depleted of alloreactive ceils. One method of achieving this is stimulating donor T cells with recipient EBV-transformed B lymphoblastoid cell lines (LCLs). Alloreactive T cells upregulate CD25 expression, and are eliminated by a CD25 Mab immunotoxin conjugate, RFT5-SMPT-dgA. This compound consists of a murine IgG1 anti-CD25 (IL-2 receptor alpha chain) conjugated via a hetero-bifunctional crosslinker [N-succinimidyloxycarbonyl-alpha-methyl-d-(2-pyridylthio) toluene] to chemically deglycosylated ricin A chain (dgA).

[0190] Treatment with CD25 immunotoxin after LCL stimulation depletes >90% of alloreactive cells. In a phase 1 clinical study, using CD25 immunotoxin to deplete alloreactive lymphocytes immune reconstitution after allodepleted donor T cells were infused at 2 dose levels into recipients of T-cell-depleted haploidentical SCT. Eight patients were treated at 10⁴ cells/kg/dose, and 8 patients received 10⁵ cells/kg/dose. Patients receiving 10⁵ cells/kg/dose showed significantly improved T-cell recovery at 3, 4, and 5 months after SCT compared with those receiving 10⁴ cells/kg/dose (P<0.05). Accelerated T-cell recovery occurred as a result of expansion of the effector memory (CD45RA(-)CCR-7(-)) population (P<0.05), suggesting that protective T-cell responses are likely to be long lived. T-cell-receptor signal joint excision circles (TRECs) were not detected in reconstituting T cells in dose-level 2 patients, indicating they are likely to be derived from the infused allodepleted cells. Spectratyping of the T cells at 4 months demonstrated a polyclonal Vbeta repertoire. Using tetramer and enzyme-linked immunospot (ELISpot) assays, cytomegalovirus (CMV)- and Epstein-Barr virus (EBV)-specific responses in 4 of 6 evaluable patients at dose level 2 as early as 2 to 4 months after transplantation, whereas such responses were not observed until 6 to 12 months in dose-level 1 patients. The incidence of significant acute (2 of 16) and chronic graft-versus-host disease (GvHD; 2 of 15) was low. These data demonstrate that allodepleted donor T cells can be safely used to improve T-cell recovery after haploidentical SCT. The amount of cells infused was subsequently escalated to 10⁶ cells/kg without evidence of GvHD.

[0191] Although this approach reconstituted antiviral immunity, relapse remained a major problem and 6 patients transplanted for high risk leukemia relapsed and died of disease. Higher T cell doses are therefore useful to reconstitute anti-tumor immunity and to provide the hoped-for anti-tumor effect, since the estimated frequency of tumor-reactive precursors is 1 to 2 logs less than frequency of viral-reactive precursors. However, in some patients, these doses of cells will be sufficient to trigger GvHD even after allodepletion (Hurley C K, et al., Biol Blood Marrow Transplant 2003; 9:610-615; Dey B R, et al., Br. J Haematol. 2006; 135:423-437; Aversa F, et al., N Engl J Med 1998; 339:1186-1193; Aversa F, et al., J Clin. On col. 2005; 23:3447-3454; Lang P, Mol. Dis. 2004; 33:281-287; Kolb H J, et al., Blood 2004; 103:767-776; Gottschalk S, et al., Annu. Rev. Med 2005; 56:29-44; Bleakley M, et al., Nat. Rev. Cancer 2004; 4:371-380; Andre-Schmutz I, et al., Lancet 2002; 360:130-137; Solomon S R, et al., Blood 2005; 106:1123-1129; Amrolia P J, et al., Blood 2006; 108:1797-1808; Amrolia P J, et al., Blood 2003; Ghetie V, et al., J Immunol Methods 1991; 142:223-230; Molldrem J J, et al., Cancer Res 1999; 59:2675-2681; Rezvani K, et al., Clin. Cancer Res. 2005; 1 1:8799-8807; Rezvani K, et al., Blood 2003; 102:2892-2900).

### Graft Versus Host Disease (GvHD)

[0192] Graft versus Host Disease is a condition that sometimes occurs after the transplantation of donor immunocompetent cells, for example, T cells, into a recipient. The transplanted cells recognize the recipient's cells as foreign, and attack and destroy them. This condition can be a dangerous effect of T cell transplantation, especially when associated with haploidentical stem cell transplantation. Sufficient T cells should be infused to provide the beneficial effects, such as, for example, the reconstitution of an immune system and the graft anti-tumor effect. But, the number of T cells that can be transplanted can be limited by the concern that the transplant will result in severe graft versus host disease.

[0193] Graft versus Host Disease may be staged as indicated in the following tables:

Staging

| | Stage 0 | Stage 1 | Stage 2 | Stage 3 | Stage 4 |
|---|---|---|---|---|---|
| Skin | No rash | Rash <25% | 25-50% | >50% | Plus bullae and |
| | | BSA | | Generalized | desquamation |
| | | | | erythroderma | |
| Gut | <500 mL | 501-1000 | 1001-1500 | >1500 mL/ | Severe |
| (for pediatric | diarrhea/day | mL/day | mL/day | day >15 cc/ | abdominal pain |
| patients) | | 5 cc/kg-10 | 10 cc/kg- | kg/day | and ileus |
| | | cc/kg/day | 15 cc/kg/day | | |
| UGI | | Severe | | | |
| | | nausea/vomiting | | | |
| Liver | Bilirubins | 2.1-3 mg/di | 3.1-6 mg/di | 6.1-15 mg/di | >15 mg/di |
| | 2 mg/di | | | | |

[0194] Acute GvHD grading may be performed by the consensus conference criteria (Przepiorka D et al., 1994 Consensus Conference on Acute GVHD Grading. Bone Marrow Transplant 1995; 15:825-828).

Grading Index of Acute GvHD

| | Skin | Liver | Gut | Upper GI |
|---|---|---|---|---|
| 0 | None and | None and | None and | None |
| I | Stage 1-2 and | None and | None | None |
| II | Stage 3 and/or | Stage 1 and/or | Stage 1 and/or | Stage 1 |
| III | None-Stage 3 | Stage 2-3 or | Stage 2-4 | N/A |
| | with | | | |
| IV | Stage 4 or | Stage 4 | N/A | N/A |

### Inducible Caspase-9 as a “Safety Switch” for Cell Therapy and for Genetically Engineered Cell Transplantation

[0195] By reducing the effect of graft versus host disease is meant, for example, a decrease in the GvHD symptoms so that the patient may be assigned a lower level stage, or, for example, a reduction of a symptom of graft versus host disease by at least 20%, 30%, 40%, 50%, 60%, 70%, 80%, 90%, 95%, or 99%. A reduction in the effect of graft versus host disease may also be measured by detection of a reduction in activated T cells involved in the GvHD reaction, such as, for example, a reduction of cells that express the marker protein, for example CD19, and express CD3 (CD3⁺CD19⁺ cells, for example) by at least 30%, 40%, 50%, 60%, 70%, 75%, 80%, 85%, 90%, 95%, or 99%.

[0196] Provided herein is an alternative suicide gene strategy that is based on human proapoptotic molecules fused with an FKBP variant that is optimized to bind a chemical inducer of dimerization (CID). Variants may include, for example, an FKBP region that has an amino acid substitution at position 36 selected from the group consisting of valine, leucine, isoleuceine and alanine (Clackson T, et al., Proc Natl Acad Sci USA. 1998, 95:10437-10442). AP1903 is a synthetic molecule that has proven safe in healthy volunteers (Iuliucci J D, et al., J Clin Pharmacol. 2001, 41:870-879). Administration of this small molecule results in cross-linking and activation of the proapoptotic target molecules. The application of this inducible system in human T lymphocytes has been explored using Fas or the death effector domain (DED) of the Fas-associated death domain—containing protein (FADD) as proapoptotic molecules. Up to 90% of T cells transduced with these inducible death molecules underwent apoptosis after administration of CID (Thomis D C, et al., Blood. 2001, 97:1249-1257; Spencer D M, et al., Curr Biol. 1996, 6: 839-847; Fan L, et al., Hum Gene Ther. 1999, 10: 2273-2285; Berger C, et al., Blood. 2004, 103:1261-1269; Junker K, et al., Gene Ther. 2003, 10:1189-197). This suicide gene strategy may be used in any appropriate cell used for cell therapy including, for example, hematopoietic stem cells, and other progenitor cells, including, for example, mesenchymal stromal cells, embryonic stem cells, and inducible pluripotent stem cells. AP20187 and AP1950, a synthetic version of AP1903, may also be used as the ligand inducer. (Amara J F (97) PNAS 94:10618-23; Clontech Laboratories-Takara Bio)

[0197] Therefore, this safety switch, catalyzed by Caspase-9, may be used where there is a condition in the cell therapy patient that requires the removal of the transfected or transduced therapeutic cells. Conditions where the cells may need to be removed include, for example, GvHD, inappropriate differentiation of the cells into more mature cells of the wrong tissue or cell type, and other toxicities. To activate the Caspase-9 switch in the case of inappropriate differentiation, it is possible to use tissue specific promoters. For example, where a progenitor cell differentiates into bone and fat cells, and the fat cells are not desired, the vector used to transfect or transduce the progenitor cell may have a fat cell specific promoter that is operably linked to the Caspase-9 nucleotide sequence. In this way, should the cells differentiate into fat cells, upon administration of the multimer ligand, apoptosis of the inappropriately differentiated fat cells should result. The methods may be used, for example, for any disorder that can be alleviated by cell therapy, including cancer, cancer in the blood or bone marrow, other blood or bone marrow borne diseases such as sickle cell anemia and metachromic leukodystrophy, and any disorder that can be alleviated by a stem cell transplantation, for example blood or bone marrow disorders such as sickle cell anemia or metachromal leukodystrophy.

[0198] The efficacy of adoptive immunotherapy may be enhanced by rendering the therapeutic T cells resistant to immune evasion strategies employed by tumor cells. In vitro studies have shown that this can be achieved by transduction with a dominant-negative receptor or an immunomodulatory cytokine (Bollard C M, et al., Blood. 2002, 99:3179-3187: Wagner H J, et al., Cancer Gene Ther. 2004, 11:81-91). Moreover, transfer of antigen-specific T-cell receptors allows for the application of T-cell therapy to a broader range of tumors (Pule M, et al., Cytotherapy. 2003, 5:211-226; Schumacher T N, Nat Rev Immunol. 2002, 2:512-519). A suicide system for engineered human T cells was developed and tested to allow their subsequent use in clinical studies. Caspase-9 has been modified and shown to be stably expressed in human T lymphocytes without compromising their functional and phenotypic characteristics while demonstrating sensitivity to CID, even in T cells that have upregulated antiapoptotic molecules. (Straathof, K. C., et al., 2005, Blood 105:4248-54).

[0199] In genetically modified cells used for gene therapy, the gene may be a heterologous polynucleotide sequence derived from a source other than the cell that is used to express the gene. The gene is derived from a prokaryotic or eukaryotic source such as a bacterium, a virus, yeast, a parasite, a plant, or even an animal. The heterologous DNA also is derived from more than one source, i.e., a multigene construct or a fusion protein. The heterologous DNA also may include a regulatory sequence, which is derived from one source and the gene from a different source. Or, the heterologous DNA may include regulatory sequences that are used to change the normal expression of a cellular endogenous gene.

### Other Caspase Molecules

[0200] Caspase polypeptides other than Caspase-9 that may be encoded by the chimeric polypeptides of the current technology include, for example, Caspase-1, Caspase-3, and Caspase-8. Discussions of these Caspase polypeptides may be found in, for example, MacCorkle, R. A., et al., Proc. Natl. Acad. Sci. U.S.A. (1998) 95:3655-3660; and Fan, L., et al. (1999) Human Gene Therapy 10:2273-2285).

### Engineering Expression Constructs

[0201] Expression constructs encode a multimeric ligand binding region and a Caspase-9 polypeptide, or, in certain embodiments a multimeric ligand binding region and a Caspase-9 polypeptide linked to a marker polypeptide, all operatively linked. In general, the term “operably linked” is meant to indicate that the promoter sequence is functionally linked to a second sequence, wherein, for example, the promoter sequence initiates and mediates transcription of the DNA corresponding to the second sequence. The Caspase-9 polypeptide may be full length or truncated. In certain embodiments, the marker polypeptide is linked to the Caspase-9 polypeptide. For example, the marker polypeptide may be linked to the Caspase-9 polypeptide via a polypeptide sequence, such as, for example, a cleavable 2A-like sequence. The marker polypeptide may be, for example, CD19, or may be, for example, a heterologous protein, selected to not affect the activity of the chimeric caspase polypeptide.

[0202] In some embodiments, the polynucleotide may encode the Caspase-9 polypeptide and a heterologous protein, which may be, for example a marker polypeptide and may be, for example, a chimeric antigen receptor. The heterologous polypeptide, for example, the chimeric antigen receptor, may be linked to the Caspase-9 polypeptide via a polypeptide sequence, such as, for example, a cleavable 2A-like sequence.

[0203] In certain examples, a nucleic acid comprising a polynucleotide coding for a chimeric antigen receptor is included in the same vector, such as, for example, a viral or plasmid vector, as a polynucleotide coding for a second polypeptide. This second polypeptide may be, for example, a caspase polypeptide, as discussed herein, or a marker polypeptide. In these examples, the construct may be designed with one promoter operably linked to a nucleic acid comprising a polynucleotide coding for the two polypeptides, linked by a cleavable 2A polypeptide. In this example, the first and second polypeptides are separated during translation, resulting in a chimeric antigen receptor polypeptide, and the second polypeptide. In other examples, the two polypeptides may be expressed separately from the same vector, where each nucleic acid comprising a polynucleotide coding for one of the polypeptides is operably linked to a separate promoter. In yet other examples, one promoter may be operably linked to the two nucleic acids, directing the production of two separate RNA transcripts, and thus two polypeptides. Therefore, the expression constructs discussed herein may comprise at least one, or at least two promoters.

[0204] 2A-like sequences, or “cleavable” 2A sequences, are derived from, for example, many different viruses, including, for example, from Thosea asigna. These sequences are sometimes also known as “peptide skipping sequences.” When this type of sequence is placed within a cistron, between two peptides that are intended to be separated, the ribosome appears to skip a peptide bond, in the case of Thosea asigna sequence, the bond between the Gly and Pro amino acids is omitted. This leaves two polypeptides, in this case the Caspase-9 polypeptide and the marker polypeptide. When this sequence is used, the peptide that is encoded 5′ of the 2A sequence may end up with additional amino acids at the carboxy terminus, including the Gly residue and any upstream in the 2A sequence. The peptide that is encoded 3′ of the 2A sequence may end up with additional amino acids at the amino terminus, including the Pro residue and any downstream in the 2A sequence. “2A” or “2A-like” sequences are part of a large family of peptides that can cause peptide bond-skipping. Various 2A sequences have been characterized (e.g., F2A, P2A, T2A), and are examples of 2A-like sequences that may be used in the polypeptides of the present application.

[0205] The expression construct may be inserted into a vector, for example a viral vector or plasmid. The steps of the methods provided may be performed using any suitable method; these methods include, without limitation, methods of transducing, transforming, or otherwise providing nucleic acid to the antigen-presenting cell, presented herein. In some embodiments, the truncated Caspase-9 polypeptide is encoded by the nucleotide sequence of SEQ ID NO 8, SEQ ID NO: 23, SEQ ID NO: 25, SEQ ID NO: 27, or a functionally equivalent fragment thereof, with or without DNA linkers, or has the amino acid sequence of SEQ ID NO: 9, SEQ ID NO: 24, SEQ ID NO: 26, or SEQ ID NO: 280r a functionally equivalent fragment thereof. In some embodiments, the CD19 polypeptide is encoded by the nucleotide sequence of SEQ ID NO 14, or a functionally equivalent fragment thereof, with or without DNA linkers, or has the amino acid sequence of SEQ ID NO: 15, or a functionally equivalent fragment thereof. A functionally equivalent fragment of the Caspase-9 polypeptide has substantially the same ability to induce apoptosis as the polypeptide of SEQ ID NO: 9, with at least 50%, 60%, 70%, 80%, 90%, or 95% of the activity of the polypeptide of SEQ ID NO: 9. A functionally equivalent fragment of the CD19 polypeptide has substantially the same ability as the polypeptide of SEQ ID No: 15, to act as a marker to be used to identify and select transduced or transfected cells, with at least 50%, 60%, 70%, 80%, 90%, or 95% of the marker polypeptide being detected when compared to the polypeptide of SEQ ID NO: 15, using standard detection techniques.

[0206] More particularly, more than one ligand binding domain or multimerizing region may be used in the expression construct. Yet further, the expression construct contains a membrane-targeting sequence. Appropriate expression constructs may include a co-stimulatory polypeptide element on either side of the above FKBP ligand binding elements.

[0207] In certain examples, the polynucleotide coding for the inducible caspase polypeptide is included in the same vector, such as, for example, a viral or plasmid vector, as a polynucleotide coding for a chimeric antigen receptor. In these examples, the construct may be designed with one promoter operably linked to a nucleic acid comprising a nucleotide sequence coding for the two polypeptides, linked by a cleavable 2A polypeptide. In this example, the first and second polypeptides are cleaved after expression, resulting in a chimeric antigen receptor polypeptide and an inducible Caspase-9 polypeptide. In other examples, the two polypeptides may be expressed separately from the same vector, where each nucleic acid comprising a nucleotide sequence coding for one of the polypeptides is operably linked to a separate promoter. In yet other examples, one promoter may be operably linked to the two nucleic acids, directing the production of two separate RNA transcripts, and thus two polypeptides. Therefore, the expression constructs discussed herein may comprise at least one, or at least two promoters.

[0208] In yet other examples, two polypeptides may be expressed in a cell using two separate vectors. The cells may be co-transfected or co-transformed with the vectors, or the vectors may be introduced to the cells at different times.

### Ligand Binding Regions

[0209] The ligand binding (“dimerization”) domain, or multimerizing region, of the expression construct can be any convenient domain that will allow for induction using a natural or unnatural ligand, for example, an unnatural synthetic ligand. The multimerizing region can be internal or external to the cellular membrane, depending upon the nature of the construct and the choice of ligand. A wide variety of ligand binding proteins, including receptors, are known, including ligand binding proteins associated with the cytoplasmic regions indicated above. As used herein the term “ligand binding domain” can be interchangeable with the term “receptor”. Of particular interest are ligand binding proteins for which ligands (for example, small organic ligands) are known or may be readily produced. These ligand binding domains or receptors include the FKBPs and cyclophilin receptors, the steroid receptors, the tetracycline receptor, the other receptors indicated above, and the like, as well as “unnatural” receptors, which can be obtained from antibodies, particularly the heavy or light chain subunit, mutated sequences thereof, random amino acid sequences obtained by stochastic procedures, combinatorial syntheses, and the like. In certain embodiments, the ligand binding region is selected from the group consisting of FKBP ligand binding region, cyclophilin receptor ligand binding region, steroid receptor ligand binding region, cyclophilin receptors ligand binding region, and tetracycline receptor ligand binding region. Often, the ligand binding region comprises a Fᵥfᵥₗₛ sequence. Sometimes, the Fᵥfᵥₗₛ sequence further comprises an additional F_{v′} sequence. Examples include, for example, those discussed in Kopytek, S. J., et al., Chemistry & Biology 7:313-321 (2000) and in Gestwicki, J. E., et al., Combinatorial Chem. & High Throughput Screening 10:667-675 (2007); Clackson T (2006) Chem Biol Drug Des 67:440-2; Clackson, T., in Chemical Biology: From Small Molecules to Systems Biology and Drug Design (Schreiber, s., et al., eds., Wley, 2007)).

[0210] For the most part, the ligand binding domains or receptor domains will be at least about 50 amino acids, and fewer than about 350 amino acids, usually fewer than 200 amino acids, either as the natural domain or truncated active portion thereof. The binding domain may, for example, be small (<25 kDa, to allow efficient transfection in viral vectors), monomeric, nonimmunogenic, have synthetically accessible, cell permeable, nontoxic ligands that can be configured for dimerization.

[0211] The receptor domain can be intracellular or extracellular depending upon the design of the expression construct and the availability of an appropriate ligand. For hydrophobic ligands, the binding domain can be on either side of the membrane, but for hydrophilic ligands, particularly protein ligands, the binding domain will usually be external to the cell membrane, unless there is a transport system for internalizing the ligand in a form in which it is available for binding. For an intracellular receptor, the construct can encode a signal peptide and transmembrane domain 5′ or 3′ of the receptor domain sequence or may have a lipid attachment signal sequence 5′ of the receptor domain sequence. Where the receptor domain is between the signal peptide and the transmembrane domain, the receptor domain will be extracellular.

[0212] The portion of the expression construct encoding the receptor can be subjected to mutagenesis for a variety of reasons. The mutagenized protein can provide for higher binding affinity, allow for discrimination by the ligand of the naturally occurring receptor and the mutagenized receptor, provide opportunities to design a receptor-ligand pair, or the like. The change in the receptor can involve changes in amino acids known to be at the binding site, random mutagenesis using combinatorial techniques, where the codons for the amino acids associated with the binding site or other amino acids associated with conformational changes can be subject to mutagenesis by changing the codon(s) for the particular amino acid, either with known changes or randomly, expressing the resulting proteins in an appropriate prokaryotic host and then screening the resulting proteins for binding.

[0213] Antibodies and antibody subunits, e.g., heavy or light chain, particularly fragments, more particularly all or part of the variable region, or fusions of heavy and light chain to create high-affinity binding, can be used as the binding domain. Antibodies that are contemplated include ones that are an ectopically expressed human product, such as an extracellular domain that would not trigger an immune response and generally not expressed in the periphery (i.e., outside the CNS/brain area). Such examples, include, but are not limited to low affinity nerve growth factor receptor (LNGFR), and embryonic surface proteins (i.e., carcinoembryonic antigen). Yet further, antibodies can be prepared against haptenic molecules, which are physiologically acceptable, and the individual antibody subunits screened for binding affinity. The cDNA encoding the subunits can be isolated and modified by deletion of the constant region, portions of the variable region, mutagenesis of the variable region, or the like, to obtain a binding protein domain that has the appropriate affinity for the ligand. In this way, almost any physiologically acceptable haptenic compound can be employed as the ligand or to provide an epitope for the ligand. Instead of antibody units, natural receptors can be employed, where the binding domain is known and there is a useful ligand for binding.

### Oligomerization

[0214] The transduced signal will normally result from ligand-mediated oligomerization of the chimeric protein molecules, i.e., as a result of oligomerization following ligand binding, although other binding events, for example allosteric activation, can be employed to initiate a signal. The construct of the chimeric protein will vary as to the order of the various domains and the number of repeats of an individual domain.

[0215] For multimerizing the receptor, the ligand for the ligand binding domains/receptor domains of the chimeric surface membrane proteins will usually be multimeric in the sense that it will have at least two binding sites, with each of the binding sites capable of binding to the ligand receptor domain. By “multimeric ligand binding region” is meant a ligand binding region that binds to a multimeric ligand. The term “multimeric ligands” include dimeric ligands. A dimeric ligand will have two binding sites capable of binding to the ligand receptor domain. Desirably, the subject ligands will be a dimer or higher order oligomer, usually not greater than about tetrameric, of small synthetic organic molecules, the individual molecules typically being at least about 150 Da and less than about 5 kDa, usually less than about 3 kDa. A variety of pairs of synthetic ligands and receptors can be employed. For example, in embodiments involving natural receptors, dimeric FK506 can be used with an FKBP12 receptor, dimerized cyclosporin A can be used with the cyclophilin receptor, dimerized estrogen with an estrogen receptor, dimerized glucocorticoids with a glucocorticoid receptor, dimerized tetracycline with the tetracycline receptor, dimerized vitamin D with the vitamin D receptor, and the like. Alternatively higher orders of the ligands, e.g., trimeric can be used. For embodiments involving unnatural receptors, e.g., antibody subunits, modified antibody subunits, single chain antibodies comprised of heavy and light chain variable regions in tandem, separated by a flexible linker domain, or modified receptors, and mutated sequences thereof, and the like, any of a large variety of compounds can be used. A significant characteristic of these ligand units is that each binding site is able to bind the receptor with high affinity and they are able to be dimerized chemically. Also, methods are available to balance the hydrophobicity/hydrophilicity of the ligands so that they are able to dissolve in serum at functional levels, yet diffuse across plasma membranes for most applications.

[0216] In certain embodiments, the present methods utilize the technique of chemically induced dimerization (CID) to produce a conditionally controlled protein or polypeptide. In addition to this technique being inducible, it also is reversible, due to the degradation of the labile dimerizing agent or administration of a monomeric competitive inhibitor.

[0217] The CID system uses synthetic bivalent ligands to rapidly crosslink signaling molecules that are fused to ligand binding domains. This system has been used to trigger the oligomerization and activation of cell surface (Spencer, D. M., et al., Science, 1993. 262: p. 1019-1024; Spencer D. M. et al., Curr Biol 1996, 6:839-847; Blau, C. A. et al., Proc Natl Acad. Sci. USA 1997, 94:3076-3081), or cytosolic proteins (Luo, Z. et al., Nature 1996, 383:181-185; MacCorkle, R. A. et al., Proc Natl Acad Sci USA 1998, 95:3655-3660), the recruitment of transcription factors to DNA elements to modulate transcription (Ho, S. N. et al., Nature 1996, 382:822-826; Rivera, V. M. et al., Nat. Med. 1996, 2:1028-1032) or the recruitment of signaling molecules to the plasma membrane to stimulate signaling (Spencer D. M. et al., Proc. Natl. Acad. Sci. USA 1995, 92:9805-9809; Holsinger, L. J. et al., Proc. Natl. Acad. Sci. USA 1995, 95:9810-9814).

[0218] The CID system is based upon the notion that surface receptor aggregation effectively activates downstream signaling cascades. In the simplest embodiment, the CID system uses a dimeric analog of the lipid permeable immunosuppressant drug, FK506, which loses its normal bioactivity while gaining the ability to crosslink molecules genetically fused to the FK506-binding protein, FKBP12. By fusing one or more FKBPs to Caspase-9, one can stimulate Caspase-9 activity in a dimerizer drug-dependent, but ligand and ectodomain-independent manner. This provides the system with temporal control, reversibility using monomeric drug analogs, and enhanced specificity. The high affinity of third-generation AP20187/AP1903 CIDs for their binding domain, FKBP12, permits specific activation of the recombinant receptor in vivo without the induction of non-specific side effects through endogenous FKBP12. FKBP12 variants having amino acid substitutions and deletions, such as FKBP12v36, that bind to a dimerizer drug, may also be used. FKBP12 variants include, but are not limited to, those having amino acid substitutions at position 36, selected from the group consisting of valine, leucine, isoleuceine, and alanine. In addition, the synthetic ligands are resistant to protease degradation, making them more efficient at activating receptors in vivo than most delivered protein agents.

[0219] The ligands used are capable of binding to two or more of the ligand binding domains. The chimeric proteins may be able to bind to more than one ligand when they contain more than one ligand binding domain. The ligand is typically a non-protein or a chemical. Exemplary ligands include, but are not limited to FK506 (e.g., FK1012).

[0220] Other ligand binding regions may be, for example, dimeric regions, or modified ligand binding regions with a wobble substitution, such as, for example, FKBP12(V36): The human 12 kDa FK506-binding protein with an F36 to V substitution, the complete mature coding sequence (amino acids 1-107), provides a binding site for synthetic dimerizer drug AP1903 (Jemal, A. et al., CA Cancer J. Clinic. 58, 71-96 (2008); Scher, H. I. and Kelly, W. K., Journal of Clinical Oncology 11, 1566-72 (1993)). Two tandem copies of the protein may also be used in the construct so that higher-order oligomers are induced upon cross-linking by AP1903.

[0221] F36V′-FKBP: F36V′-FKBP is a codon-wobbled version of F36V-FKBP. It encodes the identical polypeptide sequence as F36V-FKPB but has only 62% homology at the nucleotide level. F36V′-FKBP was designed to reduce recombination in retroviral vectors (Schellhammer, P. F. et al., J. Urol. 157, 1731-5 (1997)). F36V′-FKBP was constructed by a PCR assembly procedure. The transgene contains one copy of F36V′-FKBP linked directly to one copy of F36V-FKBP.

[0222] In some embodiments, the ligand is a small molecule. The appropriate ligand for the selected ligand binding region may be selected. Often, the ligand is dimeric, sometimes, the ligand is a dimeric FK506 or a dimeric FK506-like analog. In certain embodiments, the ligand is AP1903 (CAS Index Name: 2-Piperidinecarboxylic acid, 1-[(2S)-1-oxo-2-(3,4,5-trimethoxyphenyl)butyl]-, 1,2-ethanediylbis[imino(2-oxo-2,1-ethanediyl)oxy-3,1-phenylene[(1R)-3-(3,4-dimethoxyphenyl)propylidene]]ester, [2S-[1(R*),2R*[S*[S*[1(R*),2R*]]]]]-(9CI) CAS Registry Number: 195514-63-7; Molecular Formula: C78H98N4O20 Molecular Weight: 1411.65). In certain embodiments, the ligand is AP20187. In certain embodiments, the ligand is an AP20187 analog, such as, for example, AP1510. In some embodiments, certain analogs will be appropriate for the FKBP12, and certain analogs appropriate for the wobbled version of FKBP12. In certain embodiments, one ligand binding region is included in the chimeric protein. In other embodiments, two or more ligand binding regions are included. Where, for example, the ligand binding region is FKBP12, where two of these regions are included, one may, for example, be the wobbled version.

[0223] Other dimerization systems contemplated include the coumermycin/DNA gyrase B system. Coumermycin-induced dimerization activates a modified Raf protein and stimulating the MAP kinase cascade. See Farrar, M. A., et. Al., (1996) Nature 383, 178-181. In other embodiments, the abscisic acid (ABA) system developed by G R Crabtree and colleagues (Liang F S, et al., Sci Signal. 2011 Mar. 15; 4(164):rs2), may be used, but like DNA gyrase B, this relies on a foreign protein, which would be immunogenic.

### Membrane-Targeting

[0224] A membrane-targeting sequence or region provides for transport of the chimeric protein to the cell surface membrane, where the same or other sequences can encode binding of the chimeric protein to the cell surface membrane. Molecules in association with cell membranes contain certain regions that facilitate the membrane association, and such regions can be incorporated into a chimeric protein molecule to generate membrane-targeted molecules. For example, some proteins contain sequences at the N-terminus or C-terminus that are acylated, and these acyl moieties facilitate membrane association. Such sequences are recognized by acyltransferases and often conform to a particular sequence motif. Certain acylation motifs are capable of being modified with a single acyl moiety (often followed by several positively charged residues (e.g. human c-Src: M-G-S-N-K-S-K-P-K-D-A-S-Q-R-R-R (SEQ ID NO: 283)) to improve association with anionic lipid head groups) and others are capable of being modified with multiple acyl moieties. For example the N-terminal sequence of the protein tyrosine kinase Src can comprise a single myristoyl moiety. Dual acylation regions are located within the N-terminal regions of certain protein kinases, such as a subset of Src family members (e.g., Yes, Fyn, Lck) and G-protein alpha subunits. Such dual acylation regions often are located within the first eighteen amino acids of such proteins, and conform to the sequence motif Met-Gly-Cys-Xaa-Cys (SEQ ID NO: 284), where the Met is cleaved, the Gly is N-acylated and one of the Cys residues is S-acylated. The Gly often is myristoylated and a Cys can be palmitoylated. Acylation regions conforming to the sequence motif Cys-Ala-Ala-Xaa (so called “CAAX boxes”), which can modified with C15 or C10 isoprenyl moieties, from the C-terminus of G-protein gamma subunits and other proteins (e.g., World Wide Web address ebi.ac.uk/interpro/DisplaylproEntry?ac=IPR001230) also can be utilized. These and other acylation motifs include, for example, those discussed in Gauthier-Campbell et al., Molecular Biology of the Cell 15: 2205-2217 (2004); Glabati et al., Biochem. J. 303: 697-700 (1994) and Zlakine et al., J. Cell Science 110: 673-679 (1997), and can be incorporated in chimeric molecules to induce membrane localization. In certain embodiments, a native sequence from a protein containing an acylation motif is incorporated into a chimeric protein. For example, in some embodiments, an N-terminal portion of Lck, Fyn or Yes or a G-protein alpha subunit, such as the first twenty-five N-terminal amino acids or fewer from such proteins (e.g., about 5 to about 20 amino acids, about 10 to about 19 amino acids, or about 15 to about 19 amino acids of the native sequence with optional mutations), may be incorporated within the N-terminus of a chimeric protein. In certain embodiments, a C-terminal sequence of about 25 amino acids or less from a G-protein gamma subunit containing a CAAX box motif sequence (e.g., about 5 to about 20 amino acids, about 10 to about 18 amino acids, or about 15 to about 18 amino acids of the native sequence with optional mutations) can be linked to the C-terminus of a chimeric protein.

[0225] In some embodiments, an acyl moiety has a log p value of +1 to +6, and sometimes has a log p value of +3 to +4.5. Log p values are a measure of hydrophobicity and often are derived from octanol/water partitioning studies, in which molecules with higher hydrophobicity partition into octanol with higher frequency and are characterized as having a higher log p value. Log p values are published for a number of lipophilic molecules and log p values can be calculated using known partitioning processes (e.g., Chemical Reviews, Vol. 71, Issue 6, page 599, where entry 4493 shows lauric acid having a log p value of 4.2). Any acyl moiety can be linked to a peptide composition discussed above and tested for antimicrobial activity using known methods and those discussed hereafter. The acyl moiety sometimes is a C1-C20 alkyl, C2-C20 alkenyl, C2-C20 alkynyl, C3-C6 cycloalkyl, C1-C4 haloalkyl, C4-C12 cyclalkylalkyl, aryl, substituted aryl, or aryl (C1-C4) alkyl, for example. Any acyl-containing moiety sometimes is a fatty acid, and examples of fatty acid moieties are propyl (C3), butyl (C4), pentyl (C5), hexyl (C6), heptyl (C7), octyl (C8), nonyl (C9), decyl (C10), undecyl (C11), lauryl (C12), myristyl (C14), palmityl (C16), stearyl (C18), arachidyl (C20), behenyl (C22) and lignoceryl moieties (C24), and each moiety can contain 0, 1, 2, 3, 4, 5, 6, 7 or 8 unsaturations (i.e., double bonds). An acyl moiety sometimes is a lipid molecule, such as a phosphatidyl lipid (e.g., phosphatidyl serine, phosphatidyl inositol, phosphatidyl ethanolamine, phosphatidyl choline), sphingolipid (e.g., shingomyelin, sphingosine, ceramide, ganglioside, cerebroside), or modified versions thereof. In certain embodiments, one, two, three, four or five or more acyl moieties are linked to a membrane association region.

[0226] A chimeric protein herein also may include a single-pass or multiple pass transmembrane sequence (e.g., at the N-terminus or C-terminus of the chimeric protein). Single pass transmembrane regions are found in certain CD molecules, tyrosine kinase receptors, serine/threonine kinase receptors, TGFbeta, BMP, activin and phosphatases. Single pass transmembrane regions often include a signal peptide region and a transmembrane region of about 20 to about 25 amino acids, many of which are hydrophobic amino acids and can form an alpha helix. A short track of positively charged amino acids often follows the transmembrane span to anchor the protein in the membrane. Multiple pass proteins include ion pumps, ion channels, and transporters, and include two or more helices that span the membrane multiple times. All or substantially all of a multiple pass protein sometimes is incorporated in a chimeric protein. Sequences for single pass and multiple pass transmembrane regions are known and can be selected for incorporation into a chimeric protein molecule.

[0227] Any membrane-targeting sequence can be employed that is functional in the host and may, or may not, be associated with one of the other domains of the chimeric protein. In some embodiments, such sequences include, but are not limited to myristoylation-targeting sequence, palmitoylation-targeting sequence, prenylation sequences (i.e., farnesylation, geranyl-geranylation, CAAX Box), protein-protein interaction motifs or transmembrane sequences (utilizing signal peptides) from receptors. Examples include those discussed in, for example, ten Klooster J P et al, Biology of the Cell (2007) 99, 1-12, Vincent, S., et al., Nature Biotechnology 21:936-40, 1098 (2003).

[0228] Additional protein domains exist that can increase protein retention at various membranes. For example, an ˜120 amino acid pleckstrin homology (PH) domain is found in over 200 human proteins that are typically involved in intracellular signaling. PH domains can bind various phosphatidylinositol (PI) lipids within membranes (e.g. PI (3,4,5)-P3, PI (3,4)-P2, PI (4,5)-P2) and thus play a key role in recruiting proteins to different membrane or cellular compartments. Often the phosphorylation state of PI lipids is regulated, such as by PI-3 kinase or PTEN, and thus, interaction of membranes with PH domains are not as stable as by acyl lipids.

[0229] AP1903 for Injection

[0230] AP1903 API is manufactured by Alphora Research Inc. and AP1903 Drug Product for Injection is made by Formatech Inc. It is formulated as a 5 mg/mL solution of AP1903 in a 25% solution of the non-ionic solubilizer Solutol HS 15 (250 mg/mL, BASF). At room temperature, this formulation is a clear, slightly yellow solution. Upon refrigeration, this formulation undergoes a reversible phase transition, resulting in a milky solution. This phase transition is reversed upon re-warming to room temperature. The fill is 2.33 mL in a 3 mL glass vial (˜10 mg AP1903 for Injection total per vial).

[0231] AP1903 is removed from the refrigerator the night before the patient is dosed and stored at a temperature of approximately 21° C. overnight, so that the solution is clear prior to dilution. The solution is prepared within 30 minutes of the start of the infusion in glass or polyethylene bottles or non-DEHP bags and stored at approximately 21° C. prior to dosing.

[0232] All study medication is maintained at a temperature between 2 degrees C. and 8 degrees C., protected from excessive light and heat, and stored in a locked area with restricted access.

[0233] Upon determining a need to administer AP1903 and induce the inducible Caspase-9 polypeptide, patients may be, for example, administered a single fixed dose of AP1903 for Injection (0.4 mg/kg) via IV infusion over 2 hours, using a non-DEHP, non-ethylene oxide sterilized infusion set. The dose of AP1903 is calculated individually for all patients, and is not to be recalculated unless body weight fluctuates by 0%. The calculated dose is diluted in 100 mL in 0.9% normal saline before infusion.

[0234] In a previous Phase 1 study of AP1903, 24 healthy volunteers were treated with single doses of AP1903 for Injection at dose levels of 0.01, 0.05, 0.1, 0.5 and 1.0 mg/kg infused IV over 2 hours. AP1903 plasma levels were directly proportional to dose, with mean Cₘₐₓ values ranging from approximately 10-1275 ng/mL over the 0.01-1.0 mg/kg dose range. Following the initial infusion period, blood concentrations demonstrated a rapid distribution phase, with plasma levels reduced to approximately 18, 7, and 1% of maximal concentration at 0.5, 2 and 10 hours post-dose, respectively. AP1903 for Injection was shown to be safe and well tolerated at all dose levels and demonstrated a favorable pharmacokinetic profile. Iuliucci J D, et al., J Clin Pharmacol. 41: 870-9, 2001.

[0235] The fixed dose of AP1903 for injection used, for example, may be 0.4 mg/kg intravenously infused over 2 hours. The amount of AP1903 needed in vitro for effective signaling of cells is 10-100 nM (1600 Da MVV). This equates to 16-160 μg/L or ˜0.016-1.6 mg/kg (1.6-160 μg/kg). Doses up to 1 mg/kg were well-tolerated in the Phase 1 study of AP1903 discussed above. Therefore, 0.4 mg/kg may be a safe and effective dose of AP1903 for this Phase I study in combination with the therapeutic cells.

### Selectable Markers

[0236] In certain embodiments, the expression constructs contain nucleic acid constructs whose expression is identified in vitro or in vivo by including a marker in the expression construct. Such markers would confer an identifiable change to the cell permitting easy identification of cells containing the expression construct. Usually the inclusion of a drug selection marker aids in cloning and in the selection of transformants. For example, genes that confer resistance to neomycin, puromycin, hygromycin, DHFR, GPT, zeocin and histidinol are useful selectable markers. Alternatively, enzymes such as Herpes Simplex Virus-I thymidine kinase (tk) are employed. Immunologic surface markers containing the extracellular, non-signaling domains or various proteins (e.g. CD34, CD19, LNGFR) also can be employed, permitting a straightforward method for magnetic or fluorescence antibody-mediated sorting. The selectable marker employed is not believed to be important, so long as it is capable of being expressed simultaneously with the nucleic acid encoding a gene product. Further examples of selectable markers include, for example, reporters such as GFP, EGFP, beta-gal or chloramphenicol acetyltransferase (CAT). In certain embodiments, the marker protein, such as, for example, CD19 is used for selection of the cells for transfusion, such as, for example, in immunomagnetic selection. As discussed herein, a CD19 marker is distinguished from an anti-CD19 antibody, or, for example, an scFv, TCR, or other antigen recognition moiety that binds to CD19.

[0237] In some embodiments, a polypeptide may be included in the expression vector to aid in sorting cells. For example, the CD34 minimal epitope may be incorporated into the vector. In some embodiments, the expression vectors used to express the chimeric antigen receptors or chimeric stimulating molecules provided herein further comprise a polynucleotide that encodes the 16 amino acid CD34 minimal epitope. In some embodiments, such as certain embodiments provided in the examples herein, the CD34 minimal epitope is incorporated at the amino terminal position of the CD8 stalk.

[0238] Transmembrane Regions

[0239] A chimeric antigen receptor herein may include a single-pass or multiple pass transmembrane sequence (e.g., at the N-terminus or C-terminus of the chimeric protein). Single pass transmembrane regions are found in certain CD molecules, tyrosine kinase receptors, serine/threonine kinase receptors, TGFβ, BMP, activin and phosphatases. Single pass transmembrane regions often include a signal peptide region and a transmembrane region of about 20 to about 25 amino acids, many of which are hydrophobic amino acids and can form an alpha helix. A short track of positively charged amino acids often follows the transmembrane span to anchor the protein in the membrane. Multiple pass proteins include ion pumps, ion channels, and transporters, and include two or more helices that span the membrane multiple times. All or substantially all of a multiple pass protein sometimes is incorporated in a chimeric protein. Sequences for single pass and multiple pass transmembrane regions are known and can be selected for incorporation into a chimeric protein molecule.

[0240] In some embodiments, the transmembrane domain is fused to the extracellular domain of the CAR. In one embodiment, the transmembrane domain that naturally is associated with one of the domains in the CAR is used. In other embodiments, a transmembrane domain that is not naturally associated with one of the domains in the CAR is used. In some instances, the transmembrane domain can be selected or modified by amino acid substitution (e.g., typically charged to a hydrophobic residue) to avoid binding of such domains to the transmembrane domains of the same or different surface membrane proteins to minimize interactions with other members of the receptor complex.

[0241] Transmembrane domains may, for example, be derived from the alpha, beta, or zeta chain of the T cell receptor, CD3-ε, CD3 ζ, CD4, CD5, CD8, CD8α, CD9, CD16, CD22, CD28, CD33, CD38, CD64, CD80, CD86, CD134, CD137, or CD154. Or, in some examples, the transmembrane domain may be synthesized de novo, comprising mostly hydrophobic residues, such as, for example, leucine and valine. In certain embodiments a short polypeptide linker may form the linkage between the transmembrane domain and the intracellular domain of the chimeric antigen receptor. The chimeric antigen receptors may further comprise a stalk, that is, an extracellular region of amino acids between the extracellular domain and the transmembrane domain. For example, the stalk may be a sequence of amino acids naturally associated with the selected transmembrane domain. In some embodiments, the chimeric antigen receptor comprises a CD8 transmembrane domain, in certain embodiments, the chimeric antigen receptor comprises a CD8 transmembrane domain, and additional amino acids on the extracellular portion of the transmembrane domain, in certain embodiments, the chimeric antigen receptor comprises a CD8 transmembrane domain and a CD8 stalk. The chimeric antigen receptor may further comprise a region of amino acids between the transmembrane domain and the cytoplasmic domain, which are naturally associated with the polypeptide from which the transmembrane domain is derived.

[0242] Control Regions

### Promoters

[0243] The particular promoter employed to control the expression of a polynucleotide sequence of interest is not believed to be important, so long as it is capable of directing the expression of the polynucleotide in the targeted cell. Thus, where a human cell is targeted the polynucleotide sequence-coding region may, for example, be placed adjacent to and under the control of a promoter that is capable of being expressed in a human cell. Generally speaking, such a promoter might include either a human or viral promoter.

[0244] In various embodiments, the human cytomegalovirus (CMV) immediate early gene promoter, the SV40 early promoter, the Rous sarcoma virus long terminal repeat, β-actin, rat insulin promoter and glyceraldehyde-3-phosphate dehydrogenase can be used to obtain high-level expression of the coding sequence of interest. The use of other viral or mammalian cellular or bacterial phage promoters which are well known in the art to achieve expression of a coding sequence of interest is contemplated as well, provided that the levels of expression are sufficient for a given purpose. By employing a promoter with well-known properties, the level and pattern of expression of the protein of interest following transfection or transformation can be optimized.

[0245] Selection of a promoter that is regulated in response to specific physiologic or synthetic signals can permit inducible expression of the gene product. For example in the case where expression of a transgene, or transgenes when a multicistronic vector is utilized, is toxic to the cells in which the vector is produced in, it is desirable to prohibit or reduce expression of one or more of the transgenes. Examples of transgenes that are toxic to the producer cell line are pro-apoptotic and cytokine genes. Several inducible promoter systems are available for production of viral vectors where the transgene products are toxic (add in more inducible promoters).

[0246] The ecdysone system (Invitrogen, Carlsbad, Calif.) is one such system. This system is designed to allow regulated expression of a gene of interest in mammalian cells. It consists of a tightly regulated expression mechanism that allows virtually no basal level expression of the transgene, but over 200-fold inducibility. The system is based on the heterodimeric ecdysone receptor of Drosophila, and when ecdysone or an analog such as muristerone A binds to the receptor, the receptor activates a promoter to turn on expression of the downstream transgene high levels of mRNA transcripts are attained. In this system, both monomers of the heterodimeric receptor are constitutively expressed from one vector, whereas the ecdysone-responsive promoter, which drives expression of the gene of interest, is on another plasmid. Engineering of this type of system into the gene transfer vector of interest would therefore be useful. Cotransfection of plasmids containing the gene of interest and the receptor monomers in the producer cell line would then allow for the production of the gene transfer vector without expression of a potentially toxic transgene. At the appropriate time, expression of the transgene could be activated with ecdysone or muristeron A.

[0247] Another inducible system that may be useful is the Tet-Off™ or Tet-On™ system (Clontech, Palo Alto, Calif.) originally developed by Gossen and Bujard (Gossen and Bujard, Proc. Natl. Acad. Sci. USA, 89:5547-5551, 1992; Gossen et al., Science, 268:1766-1769, 1995). This system also allows high levels of gene expression to be regulated in response to tetracycline or tetracycline derivatives such as doxycycline. In the Tet-On™ system, gene expression is turned on in the presence of doxycycline, whereas in the Tet-Off™ system, gene expression is turned on in the absence of doxycycline. These systems are based on two regulatory elements derived from the tetracycline resistance operon of E. coli, he tetracycline operator sequence to which the tetracycline repressor binds, and the tetracycline repressor protein. The gene of interest is cloned into a plasmid behind a promoter that has tetracycline-responsive elements present in it. A second plasmid contains a regulatory element called the tetracycline-controlled transactivator, which is composed, in the Tet-Off™ system, of the VP16 domain from the herpes simplex virus and the wild-type tertracycline repressor. Thus in the absence of doxycycline, transcription is constitutively on. In the Tet-On™ system, the tetracycline repressor is not wild type and in the presence of doxycycline activates transcription. For gene therapy vector production, the Tet-Off™ system may be used so that the producer cells could be grown in the presence of tetracycline or doxycycline and prevent expression of a potentially toxic transgene, but when the vector is introduced to the patient, the gene expression would be constitutively on.

[0248] In some circumstances, it is desirable to regulate expression of a transgene in a gene therapy vector. For example, different viral promoters with varying strengths of activity are utilized depending on the level of expression desired. In mammalian cells, the CMV immediate early promoter is often used to provide strong transcriptional activation. The CMV promoter is reviewed in Donnelly, J. J., et al., 1997. Annu. Rev. Immunol. 15:617-48. Modified versions of the CMV promoter that are less potent have also been used when reduced levels of expression of the transgene are desired. When expression of a transgene in hematopoietic cells is desired, retroviral promoters such as the LTRs from MLV or MMTV are often used. Other viral promoters that are used depending on the desired effect include SV40, RSV LTR, HIV-1 and HIV-2 LTR, adenovirus promoters such as from the E1A, E2A, or MLP region, AAV LTR, HSV-TK, and avian sarcoma virus.

[0249] In other examples, promoters may be selected that are developmentally regulated and are active in particular differentiated cells. Thus, for example, a promoter may not be active in a pluripotent stem cell, but, for example, where the pluripotent stem cell differentiates into a more mature cell, the promoter may then be activated.

[0250] Similarly tissue specific promoters are used to effect transcription in specific tissues or cells so as to reduce potential toxicity or undesirable effects to non-targeted tissues. These promoters may result in reduced expression compared to a stronger promoter such as the CMV promoter, but may also result in more limited expression, and immunogenicity (Bojak, A., et al., 2002. Vaccine. 20:1975-79; Cazeaux., N., et al., 2002. Vaccine 20:3322-31). For example, tissue specific promoters such as the PSA associated promoter or prostate-specific glandular kallikrein, or the muscle creatine kinase gene may be used where appropriate.

[0251] Examples of tissue specific or differentiation specific promoters include, but are not limited to, the following: B29 (B cells); CD14 (monocytic cells); CD43 (leukocytes and platelets); CD45 (hematopoietic cells); CD68 (macrophages); desmin (muscle); elastase-1 (pancreatic acinar cells); endoglin (endothelial cells); fibronectin (differentiating cells, healing tissues); and Flt-1 (endothelial cells); GFAP (astrocytes).

[0252] In certain indications, it is desirable to activate transcription at specific times after administration of the gene therapy vector. This is done with such promoters as those that are hormone or cytokine regulatable. Cytokine and inflammatory protein responsive promoters that can be used include K and T kininogen (Kageyama et al., (1987) J. Biol. Chem., 262, 2345-2351), c-fos, TNF-alpha, C-reactive protein (Arcone, et al., (1988) Nucl. Acids Res., 16(8), 3195-3207), haptoglobin (Oliviero et al., (1987) EMBO J., 6, 1905-1912), serum amyloid A2, C/EBP alpha, IL-1, IL-6 (Poli and Cortese, (1989) Proc. Nat'l Acad. Sci. USA, 86, 8202-8206), Complement C3 (Wilson et al., (1990) Mol. Cell. Biol., 6181-6191), IL-8, alpha-1 acid glycoprotein (Prowse and Baumann, (1988) Mol Cell Biol, 8, 42-51), alpha-1 antitrypsin, lipoprotein lipase (Zechner et al., Mol. Cell. Biol., 2394-2401, 1988), angiotensinogen (Ron, et al., (1991) Mol. Cell. Biol., 2887-2895), fibrinogen, c-jun (inducible by phorbol esters, TNF-alpha, UV radiation, retinoic acid, and hydrogen peroxide), collagenase (induced by phorbol esters and retinoic acid), metallothionein (heavy metal and glucocorticoid inducible), Stromelysin (inducible by phorbol ester, interleukin-1 and EGF), alpha-2 macroglobulin and alpha-1 anti-chymotrypsin. Other promoters include, for example, SV40, MMTV, Human Immunodeficiency Virus (MV), Moloney virus, ALV, Epstein Barr virus, Rous Sarcoma virus, human actin, myosin, hemoglobin, and creatine.

[0253] It is envisioned that any of the above promoters alone or in combination with another can be useful depending on the action desired. Promoters, and other regulatory elements, are selected such that they are functional in the desired cells or tissue. In addition, this list of promoters should not be construed to be exhaustive or limiting; other promoters that are used in conjunction with the promoters and methods disclosed herein.

### Enhancers

[0254] Enhancers are genetic elements that increase transcription from a promoter located at a distant position on the same molecule of DNA. Early examples include the enhancers associated with immunoglobulin and T cell receptors that both flank the coding sequence and occur within several introns. Many viral promoters, such as CMV, SV40, and retroviral LTRs are closely associated with enhancer activity and are often treated like single elements. Enhancers are organized much like promoters. That is, they are composed of many individual elements, each of which binds to one or more transcriptional proteins. The basic distinction between enhancers and promoters is operational. An enhancer region as a whole stimulates transcription at a distance and often independent of orientation; this need not be true of a promoter region or its component elements. On the other hand, a promoter has one or more elements that direct initiation of RNA synthesis at a particular site and in a particular orientation, whereas enhancers lack these specificities. Promoters and enhancers are often overlapping and contiguous, often seeming to have a very similar modular organization. A subset of enhancers is locus-control regions (LCRs) that can not only increase transcriptional activity, but (along with insulator elements) can also help to insulate the transcriptional element from adjacent sequences when integrated into the genome. Any promoter/enhancer combination (as per the Eukaryotic Promoter Data Base EPDB) can be used to drive expression of the gene, although many will restrict expression to a particular tissue type or subset of tissues (reviewed in, for example, Kutzler, M. A., and Weiner, D. B., 2008. Nature Reviews Genetics 9:776-88). Examples include, but are not limited to, enhancers from the human actin, myosin, hemoglobin, muscle creatine kinase, sequences, and from viruses CMV, RSV, and EBV. Appropriate enhancers may be selected for particular applications. Eukaryotic cells can support cytoplasmic transcription from certain bacterial promoters if the appropriate bacterial polymerase is provided, either as part of the delivery complex or as an additional genetic expression construct.

### Polyadenylation Signals

[0255] Where a cDNA insert is employed, one will typically desire to include a polyadenylation signal to effect proper polyadenylation of the gene transcript. The nature of the polyadenylation signal is not believed to be crucial to the successful practice of the present methods, and any such sequence is employed such as human or bovine growth hormone and SV40 polyadenylation signals and LTR polyadenylation signals. One non-limiting example is the SV40 polyadenylation signal present in the pCEP3 plasmid (Invitrogen, Carlsbad, Calif.). Also, contemplated as an element of the expression cassette is a terminator. These elements can serve to enhance message levels and to minimize read through from the cassette into other sequences. Termination or poly(A) signal sequences may be, for example, positioned about 11-30 nucleotides downstream from a conserved sequence (AAUAAA) at the 3′ end of the mRNA (Montgomery, D. L., et al., 1993. DNA Cell Biol. 12:777-83; Kutzler, M. A., and Weiner, D. B., 2008. Nature Rev. Gen. 9:776-88).

[0256] 4. Initiation Signals and Internal Ribosome Binding Sites

[0257] A specific initiation signal also may be required for efficient translation of coding sequences. These signals include the ATG initiation codon or adjacent sequences. Exogenous translational control signals, including the ATG initiation codon, may need to be provided. The initiation codon is placed in-frame with the reading frame of the desired coding sequence to ensure translation of the entire insert. The exogenous translational control signals and initiation codons can be either natural or synthetic. The efficiency of expression may be enhanced by the inclusion of appropriate transcription enhancer elements.

[0258] In certain embodiments, the use of internal ribosome entry sites (IRES) elements is used to create multigene, or polycistronic messages. IRES elements are able to bypass the ribosome-scanning model of 5′ methylated cap-dependent translation and begin translation at internal sites (Pelletier and Sonenberg, Nature, 334:320-325, 1988). IRES elements from two members of the picornavirus family (polio and encephalomyocarditis) have been discussed (Pelletier and Sonenberg, 1988), as well an IRES from a mammalian message (Macejak and Sarnow, Nature, 353:90-94, 1991). IRES elements can be linked to heterologous open reading frames. Multiple open reading frames can be transcribed together, each separated by an IRES, creating polycistronic messages. By virtue of the IRES element, each open reading frame is accessible to ribosomes for efficient translation. Multiple genes can be efficiently expressed using a single promoter/enhancer to transcribe a single message (see U.S. Pat. Nos. 5,925,565 and 5,935,819, each herein incorporated by reference).

### Sequence Optimization

[0259] Protein production may also be increased by optimizing the codons in the transgene. Species specific codon changes may be used to increase protein production. Also, codons may be optimized to produce an optimized RNA, which may result in more efficient translation. By optimizing the codons to be incorporated in the RNA, elements such as those that result in a secondary structure that causes instability, secondary mRNA structures that can, for example, inhibit ribosomal binding, or cryptic sequences that can inhibit nuclear export of mRNA can be removed (Kutzler, M. A., and Weiner, D. B., 2008. Nature Rev. Gen. 9:776-88; Yan, J. et al., 2007. Mol. Ther. 15:411-21; Cheung, Y. K., et al., 2004. Vaccine 23:629-38; Narum., D. L., et al., 2001. 69:7250-55; Yadava, A., and Ockenhouse, C. F., 2003. Infect. Immun. 71:4962-69; Smith, J. M., et al., 2004. AIDS Res. Hum. Retroviruses 20:1335-47; Zhou, W., et al., 2002. Vet. Microbiol. 88:127-51; Wu, X., et al., 2004. Biochem. Biophys. Res. Commun. 313:89-96; Zhang, W., et al., 2006. Biochem. Biophys. Res. Commun. 349:69-78; Deml, L. A., et al., 2001. J. Virol. 75:1099-11001; Schneider, R. M., et al., 1997. J. Virol. 71:4892-4903; Wang, S. D., et al., 2006. Vaccine 24:4531-40; zur Megede, J., et al., 2000. J. Virol. 74:2628-2635). For example, the FBP12, the Caspase polypeptide, and the CD19 sequences may be optimized by changes in the codons.

### Leader Sequences

[0260] Leader sequences may be added to enhance the stability of mRNA and result in more efficient translation. The leader sequence is usually involved in targeting the mRNA to the endoplasmic reticulum. Examples include the signal sequence for the HIV-1 envelope glycoprotein (Env), which delays its own cleavage, and the IgE gene leader sequence (Kutzler, M. A., and Weiner, D. B., 2008. Nature Rev. Gen. 9:776-88; Li, V., et al., 2000. Virology 272:417-28; Xu, Z. L., et al. 2001. Gene 272:149-56; Malin, A. S., et al., 2000. Microbes Infect. 2:1677-85; Kutzler, M. A., et al., 2005. J. Immunol. 175:112-125; Yang, J. S., et al., 2002. Emerg. Infect. Dis. 8:1379-84; Kumar, S., et al., 2006. DNA Cell Biol. 25:383-92; Wang, S., et al., 2006. Vaccine 24:4531-40). The IgE leader may be used to enhance insertion into the endoplasmic reticulum (Tepler, I, et al. (1989) J. Biol. Chem. 264:5912).

[0261] Expression of the transgenes may be optimized and/or controlled by the selection of appropriate methods for optimizing expression. These methods include, for example, optimizing promoters, delivery methods, and gene sequences, (for example, as presented in Laddy, D. J., et al., 2008. PLoS. ONE 3 e2517; Kutzler, M. A., and Weiner, D. B., 2008. Nature Rev. Gen. 9:776-88).

### Nucleic Acids

[0262] A “nucleic acid” as used herein generally refers to a molecule (one, two or more strands) of DNA, RNA or a derivative or analog thereof, comprising a nucleobase. A nucleobase includes, for example, a naturally occurring purine or pyrimidine base found in DNA (e.g., an adenine “A,” a guanine “G,” a thymine “T” or a cytosine “C”) or RNA (e.g., an A, a G, an uracil “U” or a C). The term “nucleic acid” encompasses the terms “oligonucleotide” and “polynucleotide,” each as a subgenus of the term “nucleic acid.” Nucleic acids may be, be at least, be at most, or be about 3, 4, 5, 6, 7, 8, 9, 10, 11, 12, 13, 14, 15, 16, 17, 18, 19, 20, 21, 22, 23, 24, 25, 26, 27, 28, 29, 30, 31, 32, 33, 34, 35, 36, 37, 38, 39, 40, 41, 42, 43, 44, 45, 46, 47, 48, 49, 50, 51, 52, 53, 54, 55, 56, 57, 58, 59, 60, 61, 62, 63, 64, 65, 66, 67, 68, 69, 70, 71, 72, 73, 74, 75, 76, 77, 78, 79, 80, 81, 82, 83, 84, 85, 86, 87, 88, 89, 90, 91, 92, 93, 94, 95, 96, 97, 98, 99, 100, 101, 102, 103, 104, 105, 106, 107, 108, 109, 110, 120, 130, 140, 150, 160, 170, 180, 190, 200, 210, 220, 230, 240, 250, 260, 270, 280, 290, 300, 310, 320, 330, 340, 350, 360, 370, 380, 390, 400, 410, 420, 430, 440, 441, 450, 460, 470, 480, 490, 500, 510, 520, 530, 540, 550, 560, 570, 580, 590, 600, 610, 620, 630, 640, 650, 660, 670, 680, 690, 700, 710, 720, 730, 740, 750, 760, 770, 780, 790, 800, 810, 820, 830, 840, 850, 860, 870, 880, 890, 900, 910, 920, 930, 940, 950, 960, 970, 980, 990, or 1000 nucleotides, or any range derivable therein, in length.

[0263] Nucleic acids herein provided may have regions of identity or complementarity to another nucleic acid. It is contemplated that the region of complementarity or identity can be at least 5 contiguous residues, though it is specifically contemplated that the region is, is at least, is at most, or is about 6, 7, 8, 9, 10, 11, 12, 13, 14, 15, 16, 17, 18, 19, 20, 21, 22, 23, 24, 25, 26, 27, 28, 29, 30, 31, 32, 33, 34, 35, 36, 37, 38, 39, 40, 41, 42, 43, 44, 45, 46, 47, 48, 49, 50, 51, 52, 53, 54, 55, 56, 57, 58, 59, 60, 61, 62, 63, 64, 65, 66, 67, 68, 69, 70, 71, 72, 73, 74, 75, 76, 77, 78, 79, 80, 81, 82, 83, 84, 85, 86, 87, 88, 89, 90, 91, 92, 93, 94, 95, 96, 97, 98, 99, 100, 110, 120, 130, 140, 150, 160, 170, 180, 190, 200, 210, 220, 230, 240, 250, 260, 270, 280, 290, 300, 310, 320, 330, 340, 350, 360, 370, 380, 390, 400, 410, 420, 430, 440, 441, 450, 460, 470, 480, 490, 500, 510, 520, 530, 540, 550, 560, 570, 580, 590, 600, 610, 620, 630, 640, 650, 660, 670, 680, 690, 700, 710, 720, 730, 740, 750, 760, 770, 780, 790, 800, 810, 820, 830, 840, 850, 860, 870, 880, 890, 900, 910, 920, 930, 940, 950, 960, 970, 980, 990, or 1000 contiguous nucleotides.

[0264] As used herein, “hybridization”, “hybridizes” or “capable of hybridizing” is understood to mean forming a double or triple stranded molecule or a molecule with partial double or triple stranded nature. The term “anneal” as used herein is synonymous with “hybridize.” The term “hybridization”, “hybridize(s)” or “capable of hybridizing” encompasses the terms “stringent condition(s)” or “high stringency” and the terms “low stringency” or “low stringency condition(s).”

[0265] As used herein “stringent condition(s)” or “high stringency” are those conditions that allow hybridization between or within one or more nucleic acid strand(s) containing complementary sequence(s), but preclude hybridization of random sequences. Stringent conditions tolerate little, if any, mismatch between a nucleic acid and a target strand. Such conditions are known, and are often used for applications requiring high selectivity. Non-limiting applications include isolating a nucleic acid, such as a gene or a nucleic acid segment thereof, or detecting at least one specific mRNA transcript or a nucleic acid segment thereof, and the like.

[0266] Stringent conditions may comprise low salt and/or high temperature conditions, such as provided by about 0.02 M to about 0.5 M NaCl at temperatures of about 42 degrees C. to about 70 degrees C. It is understood that the temperature and ionic strength of a desired stringency are determined in part by the length of the particular nucleic acid(s), the length and nucleobase content of the target sequence(s), the charge composition of the nucleic acid(s), and the presence or concentration of formamide, tetramethylammonium chloride or other solvent(s) in a hybridization mixture.

[0267] It is understood that these ranges, compositions and conditions for hybridization are mentioned by way of non-limiting examples only, and that the desired stringency for a particular hybridization reaction is often determined empirically by comparison to one or more positive or negative controls. Depending on the application envisioned varying conditions of hybridization may be employed to achieve varying degrees of selectivity of a nucleic acid towards a target sequence. In a non-limiting example, identification or isolation of a related target nucleic acid that does not hybridize to a nucleic acid under stringent conditions may be achieved by hybridization at low temperature and/or high ionic strength. Such conditions are termed “low stringency” or “low stringency conditions,” and non-limiting examples of low stringency include hybridization performed at about 0.15 M to about 0.9 M NaCl at a temperature range of about 20 degrees C. to about 50 degrees C. The low or high stringency conditions may be further modified to suit a particular application.

### Nucleic Acid Modification

[0268] Any of the modifications discussed below may be applied to a nucleic acid. Examples of modifications include alterations to the RNA or DNA backbone, sugar or base, and various combinations thereof. Any suitable number of backbone linkages, sugars and/or bases in a nucleic acid can be modified (e.g., independently about 5%, 10%, 15%, 20%, 25%, 30%, 35%, 40%, 45%, 50%, 55%, 60%, 65%, 70%, 75%, 80%, 85%, 90%, 95%, up to 100%). An unmodified nucleoside is any one of the bases adenine, cytosine, guanine, thymine, or uracil joined to the 1′ carbon of beta-D-ribo-furanose.

[0269] A modified base is a nucleotide base other than adenine, guanine, cytosine and uracil at a 1′ position. Non-limiting examples of modified bases include inosine, purine, pyridin-4-one, pyridin-2-one, phenyl, pseudouracil, 2, 4, 6-trimethoxy benzene, 3-methyl uracil, dihydrouridine, naphthyl, aminophenyl, 5-alkylcytidines (e. g., 5-methylcytidine), 5-alkyluridines (e. g., ribothymidine), 5-halouridine (e. g., 5-bromouridine) or 6-azapyrimidines or 6-alkylpyrimidines (e. g. 6-methyluridine), propyne, and the like. Other non-limiting examples of modified bases include nitropyrrolyl (e.g., 3-nitropyrrolyl), nitroindolyl (e.g., 4-, 5-, 6-nitroindolyl), hypoxanthinyl, isoinosinyl, 2-aza-inosinyl, 7-deaza-inosinyl, nitroimidazolyl, nitropyrazolyl, nitrobenzimidazolyl, nitroindazolyl, aminoindolyl, pyrrolopyrimidinyl, difluorotolyl, 4-fluoro-6-methylbenzimidazole, 4-methylbenzimidazole, 3-methyl isocarbostyrilyl, 5-methyl isocarbostyrilyl, 3-methyl-7-propynyl isocarbostyrilyl, 7-azaindolyl, 6-methyl-7-azaindolyl, imidizopyridinyl, 9-methyl-imidizopyridinyl, pyrrolopyrizinyl, isocarbostyrilyl, 7-propynyl isocarbostyrilyl, propynyl-7-azaindolyl, 2,4,5-trimethylphenyl, 4-methylindolyl, 4,6-dimethylindolyl, phenyl, napthalenyl, anthracenyl, phenanthracenyl, pyrenyl, stilbenyl, tetracenyl, pentacenyl and the like.

[0270] In some embodiments, for example, a nucleic acid may comprise modified nucleic acid molecules, with phosphate backbone modifications. Non-limiting examples of backbone modifications include phosphorothioate, phosphorodithioate, methylphosphonate, phosphotriester, morpholino, amidate carbamate, carboxymethyl, acetamidate, polyamide, sulfonate, sulfonamide, sulfamate, formacetal, thioformacetal, and/or alkylsilyl modifications. In certain instances, a ribose sugar moiety that naturally occurs in a nucleoside is replaced with a hexose sugar, polycyclic heteroalkyl ring, or cyclohexenyl group. In certain instances, the hexose sugar is an allose, altrose, glucose, mannose, gulose, idose, galactose, talose, or a derivative thereof. The hexose may be a D-hexose, glucose, or mannose. In certain instances, the polycyclic heteroalkyl group may be a bicyclic ring containing one oxygen atom in the ring. In certain instances, the polycyclic heteroalkyl group is a bicyclo[2.2.1]heptane, a bicyclo[3.2.1]octane, or a bicyclo[3.3.1]nonane.

[0271] Nitropyrrolyl and nitroindolyl nucleobases are members of a class of compounds known as universal bases. Universal bases are those compounds that can replace any of the four naturally occurring bases without substantially affecting the melting behavior or activity of the oligonucleotide duplex. In contrast to the stabilizing, hydrogen-bonding interactions associated with naturally occurring nucleobases, oligonucleotide duplexes containing 3-nitropyrrolyl nucleobases may be stabilized solely by stacking interactions. The absence of significant hydrogen-bonding interactions with nitropyrrolyl nucleobases obviates the specificity for a specific complementary base. In addition, 4-, 5- and 6-nitroindolyl display very little specificity for the four natural bases. Procedures for the preparation of 1-(2′-O-methyl-beta.-D-ribofuranosyl)-5-nitroindole are discussed in Gaubert, G.; Wengel, J. Tetrahedron Letters 2004, 45, 5629. Other universal bases include hypoxanthinyl, isoinosinyl, 2-aza-inosinyl, 7-deaza-inosinyl, nitroimidazolyl, nitropyrazolyl, nitrobenzimidazolyl, nitroindazolyl, aminoindolyl, pyrrolopyrimidinyl, and structural derivatives thereof.

[0272] Difluorotolyl is a non-natural nucleobase that functions as a universal base. Difluorotolyl is an isostere of the natural nucleobase thymine. But unlike thymine, difluorotolyl shows no appreciable selectivity for any of the natural bases. Other aromatic compounds that function as universal bases are 4-fluoro-6-methylbenzimidazole and 4-methylbenzimidazole. In addition, the relatively hydrophobic isocarbostyrilyl derivatives 3-methyl isocarbostyrilyl, 5-methyl isocarbostyrilyl, and 3-methyl-7-propynyl isocarbostyrilyl are universal bases which cause only slight destabilization of oligonucleotide duplexes compared to the oligonucleotide sequence containing only natural bases. Other non-natural nucleobases include 7-azaindolyl, 6-methyl-7-azaindolyl, imidizopyridinyl, 9-methyl-imidizopyridinyl, pyrrolopyrizinyl, isocarbostyrilyl, 7-propynyl isocarbostyrilyl, propynyl-7-azaindolyl, 2,4,5-trimethylphenyl, 4-methylindolyl, 4,6-dimethylindolyl, phenyl, napthalenyl, anthracenyl, phenanthracenyl, pyrenyl, stilbenyl, tetracenyl, pentacenyl, and structural derivates thereof. For a more detailed discussion, including synthetic procedures, of difluorotolyl, 4-fluoro-6-methylbenzimidazole, 4-methylbenzimidazole, and other non-natural bases mentioned above, see: Schweitzer et al., J. Org. Chem., 59:7238-7242 (1994);

[0273] In addition, chemical substituents, for example cross-linking agents, may be used to add further stability or irreversibility to the reaction. Non-limiting examples of cross-linking agents include, for example, 1,1-bis(diazoacetyl)-2-phenylethane, glutaraldehyde, N-hydroxysuccinimide esters, for example, esters with 4-azidosalicylic acid, homobifunctional imidoesters, including disuccinimidyl esters such as 3,3′-dithiobis(succinimidylpropionate), bifunctional maleimides such as bis-N-maleimido-1,8-octane and agents such as methyl-3-[(p-azidophenyl)dithio]propioimidate.

[0274] A nucleotide analog may also include a “locked” nucleic acid. Certain compositions can be used to essentially “anchor” or “lock” an endogenous nucleic acid into a particular structure. Anchoring sequences serve to prevent disassociation of a nucleic acid complex, and thus not only can prevent copying but may also enable labeling, modification, and/or cloning of the endogeneous sequence. The locked structure may regulate gene expression (i.e. inhibit or enhance transcription or replication), or can be used as a stable structure that can be used to label or otherwise modify the endogenous nucleic acid sequence, or can be used to isolate the endogenous sequence, i.e. for cloning.

[0275] Nucleic acid molecules need not be limited to those molecules containing only RNA or DNA, but further encompass chemically-modified nucleotides and non-nucleotides. The percent of non-nucleotides or modified nucleotides may be from 1% to 100% (e.g., about 5, 10, 15, 20, 25, 30, 35, 40, 45, 50, 55, 60, 65, 70, 75, 80, 85, 90 or 95%).

### Nucleic Acid Preparation

[0276] In some embodiments, a nucleic acid is provided for use as a control or standard in an assay, or therapeutic, for example. A nucleic acid may be made by any technique known in the art, such as for example, chemical synthesis, enzymatic production or biological production. Nucleic acids may be recovered or isolated from a biological sample. The nucleic acid may be recombinant or it may be natural or endogenous to the cell (produced from the cell's genome). It is contemplated that a biological sample may be treated in a way so as to enhance the recovery of small nucleic acid molecules. Generally, methods may involve lysing cells with a solution having guanidinium and a detergent.

[0277] Nucleic acid synthesis may also be performed according to standard methods. Non-limiting examples of a synthetic nucleic acid (e.g., a synthetic oligonucleotide), include a nucleic acid made by in vitro chemical synthesis using phosphotriester, phosphite, or phosphoramidite chemistry and solid phase techniques or via deoxynucleoside H-phosphonate intermediates. Various different mechanisms of oligonucleotide synthesis have been disclosed elsewhere.

[0278] Nucleic acids may be isolated using known techniques. In particular embodiments, methods for isolating small nucleic acid molecules, and/or isolating RNA molecules can be employed. Chromatography is a process used to separate or isolate nucleic acids from protein or from other nucleic acids. Such methods can involve electrophoresis with a gel matrix, filter columns, alcohol precipitation, and/or other chromatography. If a nucleic acid from cells is to be used or evaluated, methods generally involve lysing the cells with a chaotropic (e.g., guanidinium isothiocyanate) and/or detergent (e.g., N-lauroyl sarcosine) prior to implementing processes for isolating particular populations of RNA.

[0279] Methods may involve the use of organic solvents and/or alcohol to isolate nucleic acids. In some embodiments, the amount of alcohol added to a cell lysate achieves an alcohol concentration of about 55% to 60%. While different alcohols can be employed, ethanol works well. A solid support may be any structure, and it includes beads, filters, and columns, which may include a mineral or polymer support with electronegative groups. A glass fiber filter or column is effective for such isolation procedures.

[0280] A nucleic acid isolation processes may sometimes include: a) lysing cells in the sample with a lysing solution comprising guanidinium, where a lysate with a concentration of at least about 1 M guanidinium is produced; b) extracting nucleic acid molecules from the lysate with an extraction solution comprising phenol; c) adding to the lysate an alcohol solution to form a lysate/alcohol mixture, wherein the concentration of alcohol in the mixture is between about 35% to about 70%; d) applying the lysate/alcohol mixture to a solid support; e) eluting the nucleic acid molecules from the solid support with an ionic solution; and, f) capturing the nucleic acid molecules. The sample may be dried down and resuspended in a liquid and volume appropriate for subsequent manipulation.

[0281] Provided herein are compositions or kits that comprise nucleic acid comprising the polynucleotides of the present application. Thus, compositions or kits may, for example, comprise both the first and second polynucleotides, encoding the first and second chimeric polypeptides. The nucleic acid may comprise more than one nucleic acid species, that is, for example, the first nucleic acid species comprises the first polynucleotide, and the second nucleic acid species comprises the second polynucleotide. In other examples, the nucleic acid may comprise both the first and second polynucleotides. The kit may, in addition, comprise the first or second ligand, or both.

### Methods of Gene Transfer

[0282] In order to mediate the effect of the transgene expression in a cell, it will be necessary to transfer the expression constructs into a cell. Such transfer may employ viral or non-viral methods of gene transfer. This section provides a discussion of methods and compositions of gene transfer. A transformed cell comprising an expression vector is generated by introducing into the cell the expression vector. Suitable methods for polynucleotide delivery for transformation of an organelle, a cell, a tissue or an organism for use with the current methods include virtually any method by which a polynucleotide (e.g., DNA) can be introduced into an organelle, a cell, a tissue or an organism.

[0283] A host cell can, and has been, used as a recipient for vectors. Host cells may be derived from prokaryotes or eukaryotes, depending upon whether the desired result is replication of the vector or expression of part or all of the vector-encoded polynucleotide sequences. Numerous cell lines and cultures are available for use as a host cell, and they can be obtained through the American Type Culture Collection (ATCC), which is an organization that serves as an archive for living cultures and genetic materials.

[0284] An appropriate host may be determined. Generally this is based on the vector backbone and the desired result. A plasmid or cosmid, for example, can be introduced into a prokaryote host cell for replication of many vectors. Bacterial cells used as host cells for vector replication and/or expression include DHSalpha, JM 109, and KC8, as well as a number of commercially available bacterial hosts such as SURE® Competent Cells and SOLOPACK Gold Cells (STRATAGENE®, La Jolla, Calif.). Alternatively, bacterial cells such as E. coli LE392 could be used as host cells for phage viruses. Eukaryotic cells that can be used as host cells include, but are not limited to yeast, insects and mammals. Examples of mammalian eukaryotic host cells for replication and/or expression of a vector include, but are not limited to, HeLa, NIH3T3, Jurkat, 293, COS, CHO, Saos, and PC12. Examples of yeast strains include, but are not limited to, YPH499, YPH500 and YPH501.

[0285] Nucleic acid vaccines may include, for example, non-viral DNA vectors, “naked” DNA and RNA, and viral vectors. Methods of transforming cells with these vaccines, and for optimizing the expression of genes included in these vaccines are known and are also discussed herein.

[0286] Examples of Methods of Nucleic Acid or Viral Vector Transfer

[0287] Any appropriate method may be used to transfect or transform the cells, or to administer the nucleotide sequences or compositions of the present methods. Certain examples are presented herein, and further include methods such as delivery using cationic polymers, lipid like molecules, and certain commercial products such as, for example, IN-VIVO-JET PEI.

### Ex Vivo Transformation

[0288] Various methods are available for transfecting vascular cells and tissues removed from an organism in an ex vivo setting. For example, canine endothelial cells have been genetically altered by retroviral gene transfer in vitro and transplanted into a canine (Wilson et al., Science, 244:1344-1346, 1989). In another example, Yucatan minipig endothelial cells were transfected by retrovirus in vitro and transplanted into an artery using a double-balloon catheter (Nabel et al., Science, 244(4910):1342-1344, 1989). Thus, it is contemplated that cells or tissues may be removed and transfected ex vivo using the polynucleotides presented herein. In particular aspects, the transplanted cells or tissues may be placed into an organism.

### Injection

[0289] In certain embodiments, an antigen presenting cell or a nucleic acid or viral vector may be delivered to an organelle, a cell, a tissue or an organism via one or more injections (i.e., a needle injection), such as, for example, subcutaneous, intradermal, intramuscular, intravenous, intraprotatic, intratumor, intraperitoneal, etc. Methods of injection include, for example, injection of a composition comprising a saline solution. Further embodiments include the introduction of a polynucleotide by direct microinjection. The amount of the expression vector used may vary upon the nature of the antigen as well as the organelle, cell, tissue or organism used. Intradermal, intranodal, or intralymphatic injections are some of the more commonly used methods of DC administration. Intradermal injection is characterized by a low rate of absorption into the bloodstream but rapid uptake into the lymphatic system. The presence of large numbers of Langerhans dendritic cells in the dermis will transport intact as well as processed antigen to draining lymph nodes. Proper site preparation is necessary to perform this correctly (i.e., hair is clipped in order to observe proper needle placement). Intranodal injection allows for direct delivery of antigen to lymphoid tissues. Intralymphatic injection allows direct administration of DCs.

### Electroporation

[0290] In certain embodiments, a polynucleotide is introduced into an organelle, a cell, a tissue or an organism via electroporation. Electroporation involves the exposure of a suspension of cells and DNA to a high-voltage electric discharge. In some variants of this method, certain cell wall-degrading enzymes, such as pectin-degrading enzymes, are employed to render the target recipient cells more susceptible to transformation by electroporation than untreated cells (U.S. Pat. No. 5,384,253, incorporated herein by reference).

[0291] Transfection of eukaryotic cells using electroporation has been quite successful. Mouse pre-B lymphocytes have been transfected with human kappa-immunoglobulin genes (Potter et al., (1984) Proc. Nat'l Acad. Sci. USA, 81, 7161-7165), and rat hepatocytes have been transfected with the chloramphenicol acetyltransferase gene (Tur-Kaspa et al., (1986) Mol. Cell Biol., 6, 716-718) in this manner.

[0292] In vivo electroporation for vaccines, or eVac, is clinically implemented through a simple injection technique. A DNA vector encoding a polypeptide is injected intradermally in a patient. Then electrodes apply electrical pulses to the intradermal space causing the cells localized there, especially resident dermal dendritic cells, to take up the DNA vector and express the encoded polypeptide. These polypeptide-expressing cells activated by local inflammation can then migrate to lymph-nodes, presenting antigens, for example. A nucleic acid is electroporetically administered when it is administered using electroporation, following, for example, but not limited to, injection of the nucleic acid or any other means of administration where the nucleic acid may be delivered to the cells by electroporation

[0293] Methods of electroporation are discussed in, for example, Sardesai, N. Y., and Weiner, D. B., Current Opinion in Immunotherapy 23:421-9 (2011) and Ferraro, B. et al., Human Vaccines 7:120-127 (2011), which are hereby incorporated by reference herein in their entirety.

### Calcium Phosphate

[0294] In other embodiments, a polynucleotide is introduced to the cells using calcium phosphate precipitation. Human KB cells have been transfected with adenovirus 5 DNA (Graham and van der Eb, (1973) Virology, 52, 456-467) using this technique. Also in this manner, mouse L(A9), mouse C127, CHO, CV-1, BHK, NIH3T3 and HeLa cells were transfected with a neomycin marker gene (Chen and Okayama, Mol. Cell Biol., 7(8):2745-2752, 1987), and rat hepatocytes were transfected with a variety of marker genes (Rippe et al., Mol. Cell Biol., 10:689-695, 1990).

### DEAE-Dextran

[0295] In another embodiment, a polynucleotide is delivered into a cell using DEAE-dextran followed by polyethylene glycol. In this manner, reporter plasmids were introduced into mouse myeloma and erythroleukemia cells (Gopal, T. V., Mol Cell Biol. 1985 May; 5(5):1188-90).

### Sonication Loading

[0296] Additional embodiments include the introduction of a polynucleotide by direct sonic loading. LTK-fibroblasts have been transfected with the thymidine kinase gene by sonication loading (Fechheimer et al., (1987) Proc. Nat'l Acad. Sci. USA, 84, 8463-8467).

### Liposome-Mediated Transfection

[0297] In a further embodiment, a polynucleotide may be entrapped in a lipid complex such as, for example, a liposome. Liposomes are vesicular structures characterized by a phospholipid bilayer membrane and an inner aqueous medium. Multilamellar liposomes have multiple lipid layers separated by aqueous medium. They form spontaneously when phospholipids are suspended in an excess of aqueous solution. The lipid components undergo self-rearrangement before the formation of closed structures and entrap water and dissolved solutes between the lipid bilayers (Ghosh and Bachhawat, (1991) In: Liver Diseases, Targeted Diagnosis and Therapy Using Specific Receptors and Ligands. pp. 87-104). Also contemplated is a polynucleotide complexed with Lipofectamine (Gibco BRL) or Superfect (Qiagen).

### Receptor Mediated Transfection

[0298] Still further, a polynucleotide may be delivered to a target cell via receptor-mediated delivery vehicles. These take advantage of the selective uptake of macromolecules by receptor-mediated endocytosis that will be occurring in a target cell. In view of the cell type-specific distribution of various receptors, this delivery method adds another degree of specificity.

[0299] Certain receptor-mediated gene targeting vehicles comprise a cell receptor-specific ligand and a polynucleotide-binding agent. Others comprise a cell receptor-specific ligand to which the polynucleotide to be delivered has been operatively attached. Several ligands have been used for receptor-mediated gene transfer (Wu and Wu, (1987) J. Biol. Chem., 262, 4429-4432; Wagner et al., Proc. Natl. Acad. Sci. USA, 87(9):3410-3414, 1990; Perales et al., Proc. Natl. Acad. Sci. USA, 91:4086-4090, 1994; Myers, EPO 0273085), which establishes the operability of the technique. Specific delivery in the context of another mammalian cell type has been discussed (Wu and Wu, Adv. Drug Delivery Rev., 12:159-167, 1993; incorporated herein by reference). In certain aspects, a ligand is chosen to correspond to a receptor specifically expressed on the target cell population. In other embodiments, a polynucleotide delivery vehicle component of a cell-specific polynucleotide-targeting vehicle may comprise a specific binding ligand in combination with a liposome. The polynucleotide(s) to be delivered are housed within the liposome and the specific binding ligand is functionally incorporated into the liposome membrane. The liposome will thus specifically bind to the receptor(s) of a target cell and deliver the contents to a cell. Such systems have been shown to be functional using systems in which, for example, epidermal growth factor (EGF) is used in the receptor-mediated delivery of a polynucleotide to cells that exhibit upregulation of the EGF receptor.

[0300] In still further embodiments, the polynucleotide delivery vehicle component of a targeted delivery vehicle may be a liposome itself, which may, for example, comprise one or more lipids or glycoproteins that direct cell-specific binding. For example, lactosyl-ceramide, a galactose-terminal asialoganglioside, have been incorporated into liposomes and observed an increase in the uptake of the insulin gene by hepatocytes (Nicolau et al., (1987) Methods Enzymol., 149, 157-176). It is contemplated that the tissue-specific transforming constructs may be specifically delivered into a target cell in a similar manner.

### Microprojectile Bombardment

[0301] Microprojectile bombardment techniques can be used to introduce a polynucleotide into at least one, organelle, cell, tissue or organism (U.S. Pat. No. 5,550,318; U.S. Pat. No. 5,538,880; U.S. Pat. No. 5,610,042; and PCT Application WO 94/09699; each of which is incorporated herein by reference). This method depends on the ability to accelerate DNA-coated microprojectiles to a high velocity allowing them to pierce cell membranes and enter cells without killing them (Klein et al., (1987) Nature, 327, 70-73). There are a wide variety of microprojectile bombardment techniques known in the art, many of which are applicable to the present methods. In this microprojectile bombardment, one or more particles may be coated with at least one polynucleotide and delivered into cells by a propelling force. Several devices for accelerating small particles have been developed. One such device relies on a high voltage discharge to generate an electrical current, which in turn provides the motive force (Yang et al., (1990) Proc. Nat'l Acad. Sci. USA, 87, 9568-9572). The microprojectiles used have consisted of biologically inert substances such as tungsten or gold particles or beads. Exemplary particles include those comprised of tungsten, platinum, and, in certain examples, gold, including, for example, nanoparticles. It is contemplated that in some instances DNA precipitation onto metal particles would not be necessary for DNA delivery to a recipient cell using microprojectile bombardment. However, it is contemplated that particles may contain DNA rather than be coated with DNA. DNA-coated particles may increase the level of DNA delivery via particle bombardment but are not, in and of themselves, necessary.

### Examples of Methods of Viral Vector-Mediated Transfer

[0302] Any viral vector suitable for administering nucleotide sequences, or compositions comprising nucleotide sequences, to a cell or to a subject, such that the cell or cells in the subject may express the genes encoded by the nucleotide sequences may be employed in the present methods. In certain embodiments, a transgene is incorporated into a viral particle to mediate gene transfer to a cell. Typically, the virus simply will be exposed to the appropriate host cell under physiologic conditions, permitting uptake of the virus. The present methods are advantageously employed using a variety of viral vectors, as discussed below.

### Adenovirus

[0303] Adenovirus is particularly suitable for use as a gene transfer vector because of its mid-sized DNA genome, ease of manipulation, high titer, wide target-cell range, and high infectivity. The roughly 36 kb viral genome is bounded by 100-200 base pair (bp) inverted terminal repeats (ITR), in which are contained cis-acting elements necessary for viral DNA replication and packaging. The early (E) and late (L) regions of the genome that contain different transcription units are divided by the onset of viral DNA replication.

[0304] The E1 region (E1A and E1B) encodes proteins responsible for the regulation of transcription of the viral genome and a few cellular genes. The expression of the E2 region (E2A and E2B) results in the synthesis of the proteins for viral DNA replication. These proteins are involved in DNA replication, late gene expression, and host cell shut off (Renan, M. J. (1990) Radiother Oncol., 19, 197-218). The products of the late genes (L1, L2, L3, L4 and L5), including the majority of the viral capsid proteins, are expressed only after significant processing of a single primary transcript issued by the major late promoter (MLP). The MLP (located at 16.8 map units) is particularly efficient during the late phase of infection, and all the mRNAs issued from this promoter possess a 5′ tripartite leader (TL) sequence, which makes them useful for translation.

[0305] In order for adenovirus to be optimized for gene therapy, it is necessary to maximize the carrying capacity so that large segments of DNA can be included. It also is very desirable to reduce the toxicity and immunologic reaction associated with certain adenoviral products. The two goals are, to an extent, coterminous in that elimination of adenoviral genes serves both ends. By practice of the present methods, it is possible to achieve both these goals while retaining the ability to manipulate the therapeutic constructs with relative ease.

[0306] The large displacement of DNA is possible because the cis elements required for viral DNA replication all are localized in the inverted terminal repeats (ITR) (100-200 bp) at either end of the linear viral genome. Plasmids containing ITR's can replicate in the presence of a non-defective adenovirus (Hay, R. T., et al., J Mol Biol. 1984 Jun. 5; 175(4):493-510). Therefore, inclusion of these elements in an adenoviral vector may permits replication.

[0307] In addition, the packaging signal for viral encapsulation is localized between 194-385 bp (0.5-1.1 map units) at the left end of the viral genome (Hearing et al., J. (1987) Virol., 67, 2555-2558). This signal mimics the protein recognition site in bacteriophage lambda DNA where a specific sequence close to the left end, but outside the cohesive end sequence, mediates the binding to proteins that are required for insertion of the DNA into the head structure. E1 substitution vectors of Ad have demonstrated that a 450 bp (0-1.25 map units) fragment at the left end of the viral genome could direct packaging in 293 cells (Levrero et al., Gene, 101:195-202, 1991).

[0308] Previously, it has been shown that certain regions of the adenoviral genome can be incorporated into the genome of mammalian cells and the genes encoded thereby expressed. These cell lines are capable of supporting the replication of an adenoviral vector that is deficient in the adenoviral function encoded by the cell line. There also have been reports of complementation of replication deficient adenoviral vectors by “helping” vectors, e.g., wild-type virus or conditionally defective mutants.

[0309] Replication-deficient adenoviral vectors can be complemented, in trans, by helper virus. This observation alone does not permit isolation of the replication-deficient vectors, however, since the presence of helper virus, needed to provide replicative functions, would contaminate any preparation. Thus, an additional element was needed that would add specificity to the replication and/or packaging of the replication-deficient vector. That element derives from the packaging function of adenovirus.

[0310] It has been shown that a packaging signal for adenovirus exists in the left end of the conventional adenovirus map (Tibbetts et. al. (1977) Cell, 12, 243-249). Later studies showed that a mutant with a deletion in the E1A (194-358 bp) region of the genome grew poorly even in a cell line that complemented the early (E1A) function (Hearing and Shenk, (1983) J. Mol. Biol. 167, 809-822). When a compensating adenoviral DNA (0-353 bp) was recombined into the right end of the mutant, the virus was packaged normally. Further mutational analysis identified a short, repeated, position-dependent element in the left end of the Ad5 genome. One copy of the repeat was found to be sufficient for efficient packaging if present at either end of the genome, but not when moved toward the interior of the Ad5 DNA molecule (Hearing et al., J. (1987) Virol., 67, 2555-2558).

[0311] By using mutated versions of the packaging signal, it is possible to create helper viruses that are packaged with varying efficiencies. Typically, the mutations are point mutations or deletions. When helper viruses with low efficiency packaging are grown in helper cells, the virus is packaged, albeit at reduced rates compared to wild-type virus, thereby permitting propagation of the helper. When these helper viruses are grown in cells along with virus that contains wild-type packaging signals, however, the wild-type packaging signals are recognized preferentially over the mutated versions. Given a limiting amount of packaging factor, the virus containing the wild-type signals is packaged selectively when compared to the helpers. If the preference is great enough, stocks approaching homogeneity may be achieved.

[0312] To improve the tropism of ADV constructs for particular tissues or species, the receptor-binding fiber sequences can often be substituted between adenoviral isolates. For example the Coxsackie-adenovirus receptor (CAR) ligand found in adenovirus 5 can be substituted for the CD46-binding fiber sequence from adenovirus 35, making a virus with greatly improved binding affinity for human hematopoietic cells. The resulting “pseudotyped” virus, Ad5f35, has been the basis for several clinically developed viral isolates. Moreover, various biochemical methods exist to modify the fiber to allow re-targeting of the virus to target cells. Methods include use of bifunctional antibodies (with one end binding the CAR ligand and one end binding the target sequence), and metabolic biotinylation of the fiber to permit association with customized avidin-based chimeric ligands. Alternatively, one could attach ligands (e.g. anti-CD205 bp heterobifunctional linkers (e.g. PEG-containing), to the adenovirus particle.

### Retrovirus

[0313] The retroviruses are a group of single-stranded RNA viruses characterized by an ability to convert their RNA to double-stranded DNA in infected cells by a process of reverse-transcription (Coffin, (1990) In: Virology, ed., New York: Raven Press, pp. 1437-1500). The resulting DNA then stably integrates into cellular chromosomes as a provirus and directs synthesis of viral proteins. The integration results in the retention of the viral gene sequences in the recipient cell and its descendants. The retroviral genome contains three genes—gag, pol and env—that code for capsid proteins, polymerase enzyme, and envelope components, respectively. A sequence found upstream from the gag gene, termed psi, functions as a signal for packaging of the genome into virions. Two long terminal repeat (LTR) sequences are present at the 5′ and 3′ ends of the viral genome. These contain strong promoter and enhancer sequences and also are required for integration in the host cell genome (Coffin, 1990). Thus, for example, the present technology includes, for example, cells whereby the polynucleotide used to transduce the cell is integrated into the genome of the cell.

[0314] In order to construct a retroviral vector, a nucleic acid encoding a promoter is inserted into the viral genome in the place of certain viral sequences to produce a virus that is replication-defective. In order to produce virions, a packaging cell line containing the gag, pol and env genes but without the LTR and psi components is constructed (Mann et al., (1983) Cell, 33, 153-159). When a recombinant plasmid containing a human cDNA, together with the retroviral LTR and psi sequences is introduced into this cell line (by calcium phosphate precipitation for example), the psi sequence allows the RNA transcript of the recombinant plasmid to be packaged into viral particles, which are then secreted into the culture media (Nicolas, J. F., and Rubenstein, J. L. R., (1988) In: Vectors: a Survey of Molecular Cloning Vectors and Their Uses, Rodriquez and Denhardt, Eds.). Nicolas and Rubenstein; Temin et al., (1986) In: Gene Transfer, Kucherlapati (ed.), and New York: Plenum Press, pp. 149-188; Mann et al., 1983). The media containing the recombinant retroviruses is collected, optionally concentrated, and used for gene transfer. Retroviral vectors are able to infect a broad variety of cell types. However, integration and stable expression of many types of retroviruses require the division of host cells (Paskind et al., (1975) Virology, 67, 242-248). An approach designed to allow specific targeting of retrovirus vectors recently was developed based on the chemical modification of a retrovirus by the chemical addition of galactose residues to the viral envelope. This modification could permit the specific infection of cells such as hepatocytes via asialoglycoprotein receptors, may be desired.

[0315] A different approach to targeting of recombinant retroviruses was designed, which used biotinylated antibodies against a retroviral envelope protein and against a specific cell receptor. The antibodies were coupled via the biotin components by using streptavidin (Roux et al., (1989) Proc. Nat'l Acad. Sci. USA, 86, 9079-9083). Using antibodies against major histocompatibility complex class I and class II antigens, the infection of a variety of human cells that bore those surface antigens was demonstrated with an ecotropic virus in vitro (Roux et al., 1989).

### Adeno-Associated Virus

[0316] AAV utilizes a linear, single-stranded DNA of about 4700 base pairs. Inverted terminal repeats flank the genome. Two genes are present within the genome, giving rise to a number of distinct gene products. The first, the cap gene, produces three different virion proteins (VP), designated VP-1, VP-2 and VP-3. The second, the rep gene, encodes four non-structural proteins (NS). One or more of these rep gene products is responsible for transactivating AAV transcription.

[0317] The three promoters in AAV are designated by their location, in map units, in the genome. These are, from left to right, p5, p19 and p40. Transcription gives rise to six transcripts, two initiated at each of three promoters, with one of each pair being spliced. The splice site, derived from map units 42-46, is the same for each transcript. The four non-structural proteins apparently are derived from the longer of the transcripts, and three virion proteins all arise from the smallest transcript.

[0318] AAV is not associated with any pathologic state in humans. Interestingly, for efficient replication, AAV requires “helping” functions from viruses such as herpes simplex virus I and II, cytomegalovirus, pseudorabies virus and, of course, adenovirus. The best characterized of the helpers is adenovirus, and many “early” functions for this virus have been shown to assist with AAV replication. Low-level expression of AAV rep proteins believed to hold AAV structural expression in check, and helper virus infection is thought to remove this block.

[0319] The terminal repeats of the AAV vector can be obtained by restriction endonuclease digestion of AAV or a plasmid such as p201, which contains a modified AAV genome (Samulski et al., J. Virol., 61:3096-3101 (1987)), or by other methods, including but not limited to chemical or enzymatic synthesis of the terminal repeats based upon the published sequence of AAV. It can be determined, for example, by deletion analysis, the minimum sequence or part of the AAV ITRs which is required to allow function, i.e., stable and site-specific integration. It can also be determined which minor modifications of the sequence can be tolerated while maintaining the ability of the terminal repeats to direct stable, site-specific integration.

[0320] AAV-based vectors have proven to be safe and effective vehicles for gene delivery in vitro, and these vectors are being developed and tested in pre-clinical and clinical stages for a wide range of applications in potential gene therapy, both ex vivo and in vivo (Carter and Flotte, (1995) Ann. N.Y. Acad. Sci., 770; 79-90; Chatteijee, et al., (1995) Ann. N.Y. Acad. Sci., 770, 79-90; Ferrari et al., (1996) J. Virol., 70, 3227-3234; Fisher et al., (1996) J. Virol., 70, 520-532; Flotte et al., Proc. Nat'l Acad. Sci. USA, 90, 10613-10617, (1993); Goodman et al. (1994), Blood, 84, 1492-1500; Kaplitt et al., (1994) Nat'l Genet., 8, 148-153; Kaplitt, M. G., et al., Ann Thorac Surg. 1996 December; 62(6):1669-76; Kessler et al., (1996) Proc. Nat'l Acad. Sci. USA, 93, 14082-14087; Koeberl et al., (1997) Proc. Nat'l Acad. Sci. USA, 94, 1426-1431; Mizukami et al., (1996) Virology, 217, 124-130).

[0321] AAV-mediated efficient gene transfer and expression in the lung has led to clinical trials for the treatment of cystic fibrosis (Carter and Flotte, 1995; Flotte et al., Proc. Nat'l Acad. Sci. USA, 90, 10613-10617, (1993)). Similarly, the prospects for treatment of muscular dystrophy by AAV-mediated gene delivery of the dystrophin gene to skeletal muscle, of Parkinson's disease by tyrosine hydroxylase gene delivery to the brain, of hemophilia B by Factor IX gene delivery to the liver, and potentially of myocardial infarction by vascular endothelial growth factor gene to the heart, appear promising since AAV-mediated transgene expression in these organs has recently been shown to be highly efficient (Fisher et al., (1996) J. Virol., 70, 520-532; Flotte et al., 1993; Kaplitt et al., 1994; 1996; Koeberl et al., 1997; McCown et al., (1996) Brain Res., 713, 99-107; Ping et al., (1996) Microcirculation, 3, 225-228; Xiao et al., (1996) J. Virol., 70, 8098-8108).

### Other Viral Vectors

[0322] Other viral vectors are employed as expression constructs in the present methods and compositions. Vectors derived from viruses such as vaccinia virus (Ridgeway, (1988) In: Vectors: A survey of molecular cloning vectors and their uses, pp. 467-492; Baichwal and Sugden, (1986) In, Gene Transfer, pp. 117-148; Coupar et al., Gene, 68:1-10, 1988) canary poxvirus, and herpes viruses are employed. These viruses offer several features for use in gene transfer into various mammalian cells.

[0323] Once the construct has been delivered into the cell, the nucleic acid encoding the transgene are positioned and expressed at different sites. In certain embodiments, the nucleic acid encoding the transgene is stably integrated into the genome of the cell. This integration is in the cognate location and orientation via homologous recombination (gene replacement) or it is integrated in a random, non-specific location (gene augmentation). In yet further embodiments, the nucleic acid is stably maintained in the cell as a separate, episomal segment of DNA. Such nucleic acid segments or “episomes” encode sequences sufficient to permit maintenance and replication independent of or in synchronization with the host cell cycle. How the expression construct is delivered to a cell and where in the cell the nucleic acid remains is dependent on the type of expression construct employed.

### Methods for Treating a Disease

[0324] The present methods also encompass methods of treatment or prevention of a disease where administration of cells by, for example, infusion, may be beneficial.

[0325] Cells, such as, for example, T cells, tumor infiltrating lymphocytes, natural killer cells, natural killer T cells, or progenitor cells, such as, for example, hematopoietic stem cells, mesenchymal stromal cells, stem cells, pluripotent stem cells, and embryonic stem cells may be used for cell therapy. The cells may be from a donor, or may be cells obtained from the patient. The cells may, for example, be used in regeneration, for example, to replace the function of diseased cells. The cells may also be modified to express a heterologous gene so that biological agents may be delivered to specific microenvironments such as, for example, diseased bone marrow or metastatic deposits. Mesenchymal stromal cells have also, for example, been used to provide immunosuppressive activity, and may be used in the treatment of graft versus host disease and autoimmune disorders. The cells provided in the present application contain a safety switch that may be valuable in a situation where following cell therapy, the activity of the therapeutic cells needs to be increased, or decreased. For example, where T cells that express a chimeric antigen receptor are provided to the patient, in some situations there may be an adverse event, such as off-target toxicity. Ceasing the administration of the ligand would return the therapeutic T cells to a non-activated state, remaining at a low, non-toxic, level of expression. Or, for example, the therapeutic cell may work to decrease the tumor cell, or tumor size, and may no longer be needed. In this situation, administration of the ligand may cease, and the therapeutic cells would no longer be activated. If the tumor cells return, or the tumor size increases following the initial therapy, the ligand may be administered again, in order to activate the chimeric antigen receptor-expressing T cells, and re-treat the patient.

[0326] By “therapeutic cell” is meant a cell used for cell therapy, that is, a cell administered to a subject to treat or prevent a condition or disease. In such cases, where the cells have a negative effect, the present methods may be used to remove the therapeutic cells through selective apoptosis.

[0327] In other examples, T cells are used to treat various diseases and conditions, and as a part of stem cell transplantation. An adverse event that may occur after haploidentical T cell transplantation is graft versus host disease (GvHD). The likelihood of GvHD occurring increases with the increased number of T cells that are transplanted. This limits the number of T cells that may be infused. By having the ability to selectively remove the infused T cells in the event of GvHD in the patient, a greater number of T cells may be infused, increasing the number to greater than 10⁶, greater than 10⁷, greater than 10⁸, or greater than 10⁹ cells. The number of T cells/kg body weight that may be administered may be, for example, from about 1×10⁴ T cells/kg body weight to about 9×10⁷ T cells/kg body weight, for example about 1, 2, 3, 4, 5, 6, 7, 8, or 9×10⁴; about 1, 2, 3, 4, 5, 6, 7, 8, or 9×10⁵; about 1, 2, 3, 4, 5, 6, 7, 8, or 9×10⁶; or about 1, 2, 3, 4, 5, 6, 7, 8, or 9×10⁷ T cells/kg body weight. In other examples, therapeutic cells other than T cells may be used. The number of therapeutic cells/kg body weight that may be administered may be, for example, from about 1×10⁴ T cells/kg body weight to about 9×10⁷ T cells/kg body weight, for example about 1, 2, 3, 4, 5, 6, 7, 8, or 9×10⁴; about 1, 2, 3, 4, 5, 6, 7, 8, or 9×10⁵; about 1, 2, 3, 4, 5, 6, 7, 8, or 9×10⁶; or about 1, 2, 3, 4, 5, 6, 7, 8, or 9×10⁷ therapeutic cells/kg body weight.

[0328] The term “unit dose” as it pertains to the inoculum refers to physically discrete units suitable as unitary dosages for mammals, each unit containing a predetermined quantity of pharmaceutical composition calculated to produce the desired immunogenic effect in association with the required diluent. The specifications for the unit dose of an inoculum are dictated by and are dependent upon the unique characteristics of the pharmaceutical composition and the particular immunologic effect to be achieved.

[0329] An effective amount of the pharmaceutical composition, such as the multimeric ligand presented herein, would be the amount that achieves this selected result of selectively removing the cells that include the Caspase-9 vector, such that over 60%, 70%, 80%, 85%, 90%, 95%, or 97% of the Caspase-9 expressing cells are killed. The term is also synonymous with “sufficient amount.” The effective amount for any particular application can vary depending on such factors as the disease or condition being treated, the particular composition being administered, the size of the subject, and/or the severity of the disease or condition. One can empirically determine the effective amount of a particular composition presented herein without necessitating undue experimentation.

[0330] The terms “contacted” and “exposed,” when applied to a cell, tissue or organism, are used herein to discuss the process by which the pharmaceutical composition and/or another agent, such as for example a chemotherapeutic or radiotherapeutic agent, are delivered to a target cell, tissue or organism or are placed in direct juxtaposition with the target cell, tissue or organism. To achieve cell killing or stasis, the pharmaceutical composition and/or additional agent(s) are delivered to one or more cells in a combined amount effective to kill the cell(s) or prevent them from dividing. The administration of the pharmaceutical composition may precede, be co-current with and/or follow the other agent(s) by intervals ranging from minutes to weeks. In embodiments where the pharmaceutical composition and other agent(s) are applied separately to a cell, tissue or organism, one would generally ensure that a significant period of time did not expire between the times of each delivery, such that the pharmaceutical composition and agent(s) would still be able to exert an advantageously combined effect on the cell, tissue or organism. For example, in such instances, it is contemplated that one may contact the cell, tissue or organism with two, three, four or more modalities substantially simultaneously (i.e., within less than about a minute) with the pharmaceutical composition. In other aspects, one or more agents may be administered within of from substantially simultaneously, about 1 minute, to about 24 hours to about 7 days to about 1 to about 8 weeks or more, and any range derivable therein, prior to and/or after administering the expression vector. Yet further, various combination regimens of the pharmaceutical composition presented herein and one or more agents may be employed.

### Optimized and Personalized Therapeutic Treatment

[0331] The induction of apoptosis after administration of the dimer may be optimized by determining the stage of graft versus host disease, or the number of undesired therapeutic cells that remain in the patient.

[0332] For example, determining that a patient has GvHD, and the stage of the GvHD, provides an indication to a clinician that it may be necessary to induce Caspase-9 associated apoptosis by administering the multimeric ligand. In another example, determining that a patient has a reduced level of GvHD after treatment with the multimeric ligand may indicate to the clinician that no additional dose of the multimeric ligand is needed. Similarly, after treatment with the multimeric ligand, determining that the patient continues to exhibit GvHD symptoms, or suffers a relapse of GvHD may indicate to the clinician that it may be necessary to administer at least one additional dose of multimeric ligand. The term “dosage” is meant to include both the amount of the dose and the frequency of administration, such as, for example, the timing of the next dose

[0333] In other embodiments, following administration of therapeutic cells, for example, therapeutic cells which express a chimeric antigen receptor in addition to the inducible Caspase-9 polypeptide, in the event of a need to reduce the number of modified cells or in vivo modified cells, the multimeric ligand may be administered to the patient. In these embodiments, the methods comprise determining the presence or absence of a negative symptom or condition, such as Graft vs Host Disease, or off target toxicity, and administering a dose of the multimeric ligand. The methods may further comprise monitoring the symptom or condition and administering an additional dose of the multimeric ligand in the event the symptom or condition persists. This monitoring and treatment schedule may continue while the therapeutic cells that express chimeric antigen receptors or chimeric signaling molecules remain in the patient.

[0334] An indication of adjusting or maintaining a subsequent drug dose, such as, for example, a subsequence dose of the multimeric ligand, and/or the subsequent drug dosage, can be provided in any convenient manner. An indication may be provided in tabular form (e.g., in a physical or electronic medium) in some embodiments. For example, the graft versus host disease observed symptoms may be provided in a table, and a clinician may compare the symptoms with a list or table of stages of the disease. The clinician then can identify from the table an indication for subsequent drug dose. In certain embodiments, an indication can be presented (e.g., displayed) by a computer, after the symptoms or the GvHD stage is provided to the computer (e.g., entered into memory on the computer). For example, this information can be provided to a computer (e.g., entered into computer memory by a user or transmitted to a computer via a remote device in a computer network), and software in the computer can generate an indication for adjusting or maintaining a subsequent drug dose, and/or provide the subsequent drug dose amount.

[0335] Once a subsequent dose is determined based on the indication, a clinician may administer the subsequent dose or provide instructions to adjust the dose to another person or entity. The term “clinician” as used herein refers to a decision maker, and a clinician is a medical professional in certain embodiments. A decision maker can be a computer or a displayed computer program output in some embodiments, and a health service provider may act on the indication or subsequent drug dose displayed by the computer. A decision maker may administer the subsequent dose directly (e.g., infuse the subsequent dose into the subject) or remotely (e.g., pump parameters may be changed remotely by a decision maker).

[0336] In some examples, a dose, or multiple doses of the ligand may be administered before clinical manifestations of GvHD, or other symptoms, such as CRS symptoms, are apparent. In this example, cell therapy is terminated before the appearance of negative symptoms. In other embodiments, such as, for example, hematopoietic cell transplant for the treatment of a genetic disease, the therapy may be terminated after the transplant has made progress toward engraftment, but before clinically observable GvHD, or other negative symptoms, can occur. In other examples, the ligand may be administered to eliminate the modified cells in order to eliminate on target/off-tumor cells, such as, for example, healthy B cells co-expressing the B cell-associated target antigen.

[0337] Methods as presented herein include without limitation the delivery of an effective amount of an activated cell, a nucleic acid or an expression construct encoding the same. An “effective amount” of the pharmaceutical composition, generally, is defined as that amount sufficient to detectably and repeatedly to achieve the stated desired result, for example, to ameliorate, reduce, minimize or limit the extent of the disease or its symptoms. Other more rigorous definitions may apply, including elimination, eradication or cure of disease. In some embodiments there may be a step of monitoring the biomarkers to evaluate the effectiveness of treatment and to control toxicity.

### Dual Control of Therapeutic Cells and Heterdimerizer Control of Apoptosis for Controlled Therapy

[0338] Nucleic acids and cells provided herein may be used to achieve dual control of therapeutic cells for controlled therapy. For example, the subject may be diagnosed with a condition, such as a tumor, where there is a need to deliver targeted chimeric antigen receptor therapy. Methods discussed herein provide several examples of ways to control therapy in order to induce activity of the CAR-expressing therapeutic cells, and also to provide a safety switch should there be a need to discontinue therapy completely, or to reduce the number or percent of the therapeutic cells in the subject.

[0339] In certain examples, modified T cells are administered to a subject that express the following polypeptides: 1. A chimeric polypeptide (iMyD88/CD40, or “iMC”) that comprises two or more FKBP12 ligand binding regions and a costimulatory polypeptide or polypeptides, such as, for example, MyD88 or truncated MyD88 and CD40; 2. A chimeric proapoptotic polypeptide that comprises one or more FRB ligand binding regions and a Caspase-9 polypeptide; 3. A chimeric antigen receptor polypeptide comprising an antigen recognition moiety that binds to a target antigen. In this example, the target antigen is a tumor antigen present on tumor cells in the subject. Following administration, the ligand AP1903 may be administered to the subject, which induces iMC activation of the CAR-T cell. The therapy is monitored, for example, the tumor size or growth may be assessed during the course of therapy. One or more doses of the ligand may be administered during the course of therapy.

[0340] Therapy may be modulated by discontinuing administration of AP1903, which may lower the activation level of the CAR-T cell. To discontinue CAR-T cell therapy, the safety switch—chimeric Caspase-9 polypeptide may be activated by administering a rapalog, which binds to the FRB ligand binding region. The amount and dosing schedule of the rapalog may be determined based on the level of CAR-T cell therapy that is needed. As a safety switch, the dose of the rapalog is an amount effective to remove at least 30%, 40%, 50%, 60%, 70%, 80%, 90%, 95%, 97%, 98%, or 99% of the administered modified cells. In other examples, the dose is an amount effective to remove up to 30%, 40%, 50%, 60%, 70%, 80%, 90, 95%, or 100% of the cells that express the chimeric caspase polypeptide, if there is a need to reduce the level of CAR-T cell therapy, but not completely stop the therapy. This may be measured, for example, by obtaining a sample from the subject before inducing the safety switch, before administering the rapamycin or rapalog, and obtaining a sample following administration of the rapamycin or rapalog, at, for example 0.5, 1, 2, 3, 4, 5, 6, 7, 8, 9, 10 hours, or 1, 2, 3, 4, 5 days following administration, and comparing the number or concentration of chimeric caspase-expressing cells between the two samples by, for example, any method available, including, for example, detecting the presence of a marker. This method of determining percent removal of the cells may also be used where the inducing ligand is AP1903 or binds to the FKBP12 or FKBP12 variant multimerizing region.

[0341] In some examples, the inducible MyD88/CD40 chimeric polypeptide also comprises the chimeric antigen receptor. In these examples, where the two polypeptides are present on the same molecule, the chimeric polypeptide may comprise one or more ligand binding regions.

[0342] Chemical Induction of protein Dimerization (CID) has been effectively applied to make cellular suicide or apoptosis inducible with the small molecule homodimerizing ligand, rimiducid (AP1903). This technology underlies the “safety switch” incorporated as a gene therapy adjunct in cell transplants (1, 2). The central tenet of the technology is that normal cellular regulatory pathways that rely on protein-protein interaction as part of a signaling pathway can be adapted to ligand-dependent, conditional control if a small molecule dimerizing drug is used to control the protein-protein oligomerization event (3-5). Induced dimerization of a fusion protein comprising Caspase-9 and FKBP12 or an FKBP12 variant (i.e., “iCaspase9/iCasp9/iC9/CaspaCIDe”) using a homodimerizing ligand, such as rimiducid, AP1510 or AP20187, can rapidly effect cell death. Caspase-9 is an initiating caspase that acts as a “gate-keeper” of the apoptotic process (6). Normally, pro-apoptotic molecules (e.g., cytochrome c) released from the mitochondria of apoptotic cells alter the conformation of Apaf-1, a caspase-9-binding scaffold, leading to its oligomerization and formation of the “apoptosome”. This alteration facilitates caspase-9 dimerization and cleavage of its latent form into an active molecule that, in turn, cleaves the “downstream” apoptosis effector, caspase-3, leading to irreversible cell death. Rimiducid binds directly with two FKBP12-V36 moieties and can direct the dimerization of fusion proteins that include FKBP12-V36 (1, 2). iC9 engagement with rimiducid circumvents the need for Apaf1 conversion to the active apoptosome. In this example, the fusion of caspase-9 to protein moieties that engage a heterodimerizing ligand is assayed for its ability to direct its activation and cell death with similar efficacy to rimiducid-mediated iC9 activation.

[0343] MyD88 and CD40 were chosen as the basis of the iMC activation switch. MyD88 plays a central signaling role in the detection of pathogens or cell injury by antigen-presenting cells (APCs), like dendritic cells (DCs). Following exposure to pathogen- or necrotic cells-derived “danger” molecules”, a subclass of “pattern recognition receptors”, called Toll-Like Receptors (TLRs) are activated, leading to the aggregation and activation of adapter molecule, MyD88, via homologous TLR-IL1Ra (TIR) domains on both proteins. MyD88, in turn, activates downstream signaling, via the rest of the protein. This leads to the upregulation of costimulatory proteins, like CD40, and other proteins, like MHC and proteases, needed for antigen processing and presentation. The fusion of signaling domains from MyD88 and CD40 with two Fv domains, provides iMC (also iFvFvMC), which potently activated DCs following exposure to rimiducid (7). It was later found that iMC is a potent costimulatory protein for T cells, as well.

[0344] Rapamycin is a natural product macrolide that binds with high affinity (<1 nM) to FKBP12 and together initiates the high-affinity, inhibitory interaction with the FKBP-Rapamycin-Binding (FRB) domain of mTOR (8). FRB is small (89 amino acids) and can thereby be used as a protein “tag” or “handle” when appended to many proteins (9-11). Coexpression of a FRB-fused protein with a second FKBP12-fused protein renders their approximation rapamycin-inducible (12-16). This and the examples that follow provide experiments and results designed to test whether expression of FRB-bound Caspase-9 with FKBP-bound Caspase-9 (iC9) can also direct apoptosis and serve as the basis for a cell safety switch regulated by the orally available ligand, rapamycin, or derivatives of rapamycin (rapalogs) that do not inhibit mTOR at a low, therapeutic dose but instead bind with selected, Caspase-9-fused mutant FRB domains.

[0345] Some of the following references are referred to in this section, and are hereby incorporated by reference herein in their entireties.
[0346] 1. Straathof K C, Pule M A, Yotnda P, Dotti G, Vanin E F, Brenner M K, Heslop H E, Spencer D M, and Rooney C M. An inducible caspase 9 safety switch for T-cell therapy. Blood. 2005; 105(11):4247-54.
[0347] 2. Fan L, Freeman K W, Khan T, Pham E, and Spencer D M. Improved artificial death switches based on caspases and FADD. Hum Gene Ther. 1999; 10(14):2273-85.
[0348] 3. Spencer D M, Wandless T J, Schreiber S L, and Crabtree G R. Controlling signal transduction with synthetic ligands. Science. 1993; 262(5136):1019-24.
[0349] 4. Acevedo V D, Gangula R D, Freeman K W, Li R, Zhang Y, Wang F, Ayala G E, Peterson L E, Ittmann M, and Spencer D M. Inducible FGFR-1 activation leads to irreversible prostate adenocarcinoma and an epithelial-to-mesenchymal transition. Cancer Cell. 2007; 12(6):559-71.
[0350] 5. Spencer D M, Belshaw P J, Chen L, Ho S N, Randazzo F, Crabtree G R, and Schreiber S L. Functional analysis of Fas signaling in vivo using synthetic inducers of dimerization. Curr Biol. 1996; 6(7):839-47.
[0351] 6. Strasser A, Cory S, and Adams J M. Deciphering the rules of programmed cell death to improve therapy of cancer and other diseases. EMBO J. 2011; 30(18):3667-83.
[0352] 7. Narayanan P, Lapteva N, Seethammagari M, Levitt J M, Slawin K M, and Spencer D M. A composite MyD88/CD40 switch synergistically activates mouse and human dendritic cells for enhanced antitumor efficacy. J Clin Invest. 2011; 121(4):1524-34.
[0353] 8. Sabatini D M, Erdjument-Bromage H, Lui M, Tempst P, and Snyder S H. RAFT1: a mammalian protein that binds to FKBP12 in a rapamycin-dependent fashion and is homologous to yeast TORs. Cell. 1994; 78(1):35-43.
[0354] 9. Brown E J, Albers M W, Shin T B, Ichikawa K, Keith C T, Lane W S, and Schreiber S L. A mammalian protein targeted by G1-arresting rapamycin-receptor complex. Nature. 1994; 369(6483):756-8.
[0355] 10. Chen J, Zheng X F, Brown E J, and Schreiber S L. Identification of an 11-kDa FKBP12-rapamycin-binding domain within the 289-kDa FKBP12-rapamycin-associated protein and characterization of a critical serine residue. Proc Natl Acad Sci USA. 1995; 92(11):4947-51.
[0356] 11. Choi J, Chen J, Schreiber S L, and Clardy J. Structure of the FKBP12-rapamycin complex interacting with the binding domain of human FRAP. Science. 1996; 273(5272):239-42.
[0357] 12. Ho S N, Biggar S R, Spencer D M, Schreiber S L, and Crabtree G R. Dimeric ligands define a role for transcriptional activation domains in reinitiation. Nature. 1996; 382(6594):822-6.
[0358] 13. Klemm J D, Beals C R, and Crabtree G R. Rapid targeting of nuclear proteins to the cytoplasm. Curr Biol. 1997; 7(9):638-44.
[0359] 14. Bayle J H, Grimley J S, Stankunas K, Gestwicki J E, Wandless T J, and Crabtree G R. Rapamycin analogs with differential binding specificity permit orthogonal control of protein activity. Chem Biol. 2006; 13(1):99-107.
[0360] 15. Stankunas K, Bayle J H, Gestwicki J E, Lin Y M, Wandless T J, and Crabtree G R. Conditional protein alleles using knockin mice and a chemical inducer of dimerization. Mol Cell. 2003; 12(6):1615-24.
[0361] 16. Stankunas K, Bayle J H, Havranek J J, Wandless T J, Baker D, Crabtree G R, and Gestwicki J E. Rescue of Degradation-Prone Mutants of the FK506-Rapamycin Binding (FRB) Protein with Chemical Ligands. Chembiochem. 2007.

### Formulations and Routes for Administration to Patients

[0362] Where clinical applications are contemplated, it will be necessary to prepare pharmaceutical compositions—expression constructs, expression vectors, fused proteins, transfected or transduced cells, in a form appropriate for the intended application. Generally, this will entail preparing compositions that are essentially free of pyrogens, as well as other impurities that could be harmful to humans or animals.

[0363] The multimeric ligand, such as, for example, AP1903, may be delivered, for example at doses of about 0.1 to 10 mg/kg subject weight, of about 0.1 to 5 mg/kg subject weight, of about 0.2 to 4 mg/kg subject weight, of about 0.3 to 3 mg/kg subject weight, of about 0.3 to 2 mg/kg subject weight, or about 0.3 to 1 mg/kg subject weight, for example, about 0.1, 0.2, 0.3, 0.4, 0.5, 0.6, 0.7, 0.8, 0.9, 1.0, 1.5, 2, 2.5, 3, 3.5, 4, 4.5, 5, 6, 7, 8, 9, or 10 mg/kg subject weight. In some embodiments, the ligand is provided at 0.4 mg/kg per dose, for example at a concentration of 5 mg/mL. Vials or other containers may be provided containing the ligand at, for example, a volume per vial of about 0.25 ml to about 10 ml, for example, about 0.25, 0.5, 1, 1.5, 2, 2.5, 3, 3.5, 4, 4.5, 5, 5.5, 6, 6.5, 7, 7.5, 8, 8.5, 9, 9.5, or 10 ml, for example, about 2 ml.

[0364] One may generally desire to employ appropriate salts and buffers to render delivery vectors stable and allow for uptake by target cells. Buffers also may be employed when recombinant cells are introduced into a patient. Aqueous compositions comprise an effective amount of the vector to cells, dissolved or dispersed in a pharmaceutically acceptable carrier or aqueous medium. Such compositions also are referred to as inocula. A pharmaceutically acceptable carrier includes any and all solvents, dispersion media, coatings, antibacterial and antifungal agents, isotonic and absorption delaying agents and the like. The use of such media and agents for pharmaceutically active substances is known. Except insofar as any conventional media or agent is incompatible with the vectors or cells, its use in therapeutic compositions is contemplated. Supplementary active ingredients also can be incorporated into the compositions.

[0365] The active compositions may include classic pharmaceutical preparations. Administration of these compositions will be via any common route so long as the target tissue is available via that route. This includes, for example, oral, nasal, buccal, rectal, vaginal or topical. Alternatively, administration may be by orthotopic, intradermal, subcutaneous, intramuscular, intraperitoneal or intravenous injection. Such compositions would normally be administered as pharmaceutically acceptable compositions, discussed herein.

[0366] The pharmaceutical forms suitable for injectable use include sterile aqueous solutions or dispersions and sterile powders for the extemporaneous preparation of sterile injectable solutions or dispersions. In all cases the form is sterile and is fluid to the extent that easy syringability exists. It is stable under the conditions of manufacture and storage and is preserved against the contaminating action of microorganisms, such as bacteria and fungi. The carrier can be a solvent or dispersion medium containing, for example, water, ethanol, polyol (for example, glycerol, propylene glycol, and liquid polyethylene glycol, and the like), suitable mixtures thereof, and vegetable oils. The proper fluidity can be maintained, for example, by the use of a coating, such as lecithin, by the maintenance of the required particle size in the case of dispersion and by the use of surfactants. The prevention of the action of microorganisms can be brought about by various antibacterial and antifungal agents, for example, parabens, chlorobutanol, phenol, sorbic acid, thimerosal, and the like. In certain examples, isotonic agents, for example, sugars or sodium chloride may be included. Prolonged absorption of the injectable compositions can be brought about by the use in the compositions of agents delaying absorption, for example, aluminum monostearate and gelatin.

[0367] For oral administration, the compositions may be incorporated with excipients and used in the form of non-ingestible mouthwashes and dentifrices. A mouthwash may be prepared incorporating the active ingredient in the required amount in an appropriate solvent, such as a sodium borate solution (Dobell's Solution). Alternatively, the active ingredient may be incorporated into an antiseptic wash containing sodium borate, glycerin and potassium bicarbonate. The active ingredient also may be dispersed in dentifrices, including, for example: gels, pastes, powders and slurries. The active ingredient may be added in a therapeutically effective amount to a paste dentifrice that may include, for example, water, binders, abrasives, flavoring agents, foaming agents, and humectants.

[0368] The compositions may be formulated in a neutral or salt form. Pharmaceutically-acceptable salts include, for example, the acid addition salts (formed with the free amino groups of the protein) and which are formed with inorganic acids such as, for example, hydrochloric or phosphoric acids, or such organic acids as acetic, oxalic, tartaric, mandelic, and the like. Salts formed with the free carboxyl groups can also be derived from inorganic bases such as, for example, sodium, potassium, ammonium, calcium, or ferric hydroxides, and such organic bases as isopropylamine, trimethylamine, histidine, procaine and the like.

[0369] Upon formulation, solutions will be administered in a manner compatible with the dosage formulation and in such amount as is therapeutically effective. The formulations are easily administered in a variety of dosage forms such as injectable solutions, drug release capsules and the like. For parenteral administration in an aqueous solution, for example, the solution may be suitably buffered if necessary and the liquid diluent first rendered isotonic with sufficient saline or glucose. These particular aqueous solutions are especially suitable for intravenous, intramuscular, subcutaneous and intraperitoneal administration. In this connection, sterile aqueous media can be employed. For example, one dosage could be dissolved in 1 ml of isotonic NaCl solution and either added to 1000 ml of hypodermoclysis fluid or injected at the proposed site of infusion, (see for example, “Remington's Pharmaceutical Sciences” 15th Edition, pages 1035-1038 and 1570-1580). Some variation in dosage will necessarily occur depending on the condition of the subject being treated. The person responsible for administration will, in any event, determine the appropriate dose for the individual subject. Moreover, for human administration, preparations may meet sterility, pyrogenicity, and general safety and purity standards as required by FDA Office of Biologics standards.

### EXAMPLES

[0370] The examples set forth below illustrate certain embodiments and do not limit the technology.

[0371] Mechanisms for selectively ablating the donor cells have been studied as safety switches for cellular therapies, but there have been complications. Some experience with safety-switch genes to date has been in T lymphocytes since immunotherapy with these cells has proved efficacious as treatment for viral infections and malignancies (Walter, E. A., et al., N. Engl. J. Med. 1995, 333:1038-44; Rooney, C. M., et al., Blood. 1998, 92:1549-55; Dudley, M. E., et al., Science 2002, 298:850-54; Marjit, W. A., et al., Proc. Natl. Acad. Sci. USA 2003, 100:2742-47). The herpes simplex virus I-derived thymidine kinase (HSVTK) gene has been used as an in vivo suicide switch in donor T-cell infusions to treat recurrent malignancy and Epstein Barr virus (EBV) lymphoproliferation after hematopoietic stem cell transplantation (Bonini C, et al., Science. 1997, 276:1719-1724; Tiberghien P, et al., Blood. 2001, 97:63-72). However, destruction of T cells causing graft-versus-host disease was incomplete, and the use of gancyclovir (or analogs) as a pro-drug to activate HSV-TK precludes administration of gancyclovir as an antiviral drug for cytomegalovirus infections. This mechanism of action also requires interference with DNA synthesis, relying on cell division, so that cell killing may be protracted over several days and incomplete, producing a lengthy delay in clinical benefit (Ciceri, F., et al., Lancet Oncol. 2009, 262:1019-24). Moreover, HSV-TK-directed immune responses have resulted in elimination of HSV-TK-transduced cells, even in immunosuppressed human immunodeficiency virus and bone marrow transplant patients, compromising the persistence and hence efficacy of the infused T cells. HSV-TK is also virus-derived, and therefore potentially immunogenic (Bonini C, et al., Science. 1997, 276:1719-1724; Riddell S R, et al., Nat Med. 1996, 2:216-23). The E. coli-derived cytosine deaminase gene has also been used clinically (Freytag S O, et al., Cancer Res. 2002, 62:4968-4976), but as a xenoantigen it may be immunogenic and thus incompatible with T-cell-based therapies that require long-term persistence. Transgenic human CD20, which can be activated by a monoclonal chimeric anti-CD20 antibody, has been proposed as a nonimmunogenic safety system (Introna M, et al., Hum Gene Ther. 2000, 11: 611-620).

[0372] The following section provides examples of method of providing a safety switch in cells used for cellular therapy, using a Caspase-9 chimeric protein.

### Example 1

### Construction and Evaluation of Caspase-9 Suicide Switch Expression Vectors

[0373] Vector Construction and Confirmation of Expression

[0374] A safety switch that can be stably and efficiently expressed in human T cells is presented herein. The system includes human gene products with low potential immunogenicity that have been modified to interact with a small molecule dimerizer drug that is capable of causing the selective elimination of transduced T cells expressing the modified gene. Additionally the inducible Caspase-9 maintains function in T cells overexpressing antiapoptotic molecules.

[0375] Expression vectors suitable for use as a therapeutic agent were constructed that included a modified human Caspase-9 activity fused to a human FK506 binding protein (FKBP), such as, for example, FKBP12v36. The Caspase-9/FK506 hybrid activity can be dimerized using a small molecule pharmaceutical. Full length, truncated, and modified versions of the Caspase-9 activity were fused to the ligand binding domain, or multimerizing region, and inserted into the retroviral vector MSCV.IRES.GRP, which also allows expression of the fluorescent marker, GFP. FIG. 1A illustrates the full length, truncated and modified Caspase-9 expression vectors constructed and evaluated as a suicide switch for induction of apoptosis.

[0376] The full-length inducible Caspase-9 molecule (F′-F-C-Casp9) includes 2, 3, or more FK506 binding proteins (FKBPs—for example, FKBP12v36 variants) linked with a Gly-Ser-Gly-Gly-Gly-Ser linker (SEQ ID NO: 285) to the small and large subunit of the Caspase molecule (see FIG. 1A). Full-length inducible Caspase-9 (F′F-C-Casp9.I.GFP) has a full-length Caspase-9, also includes a Caspase recruitment domain (CARD; GenBank NM001 229) linked to 2 12-kDa human FK506 binding proteins (FKBP12; GenBank AH002 818) that contain an F36V mutation (FIG. 1A). The amino acid sequence of one or more of the FKBPs (F′) was codon-wobbled (e.g., the 3^{rd} nucleotide of each amino acid codon was altered by a silent mutation that maintained the originally encoded amino acid) to prevent homologous recombination when expressed in a retrovirus. F′F-C-Casp9C3S includes a cysteine to serine mutation at position 287 that disrupts its activation site. In constructs F′F-Casp9, F-C-Casp9, and F′-Casp9, either the Caspase activation domain (CARD), one FKBP, or both, were deleted, respectively. All constructs were cloned into MSCV.IRES.GFP as EcoRI-XhoI fragments.

[0377] 293T cells were transfected with each of these constructs and 48 hours after transduction expression of the marker gene GFP was analyzed by flow cytometry. In addition, 24 hours after transfection, 293T cells were incubated overnight with 100 nM CID and subsequently stained with the apoptosis marker annexin V. The mean and standard deviation of transgene expression level (mean GFP) and number of apoptotic cells before and after exposure to the chemical inducer of dimerization (CID) (% annexin V within GFP-cells) from 4 separate experiments are shown in the second through fifth columns of the table in FIG. 1A. In addition to the level of GFP expression and staining for annexin V, the expressed gene products of the full length, truncated and modified Caspase-9 were also analyzed by western blot to confirm the Caspase-9 genes were being expressed and the expressed product was the expected size. The results of the western blot are presented in FIG. 1B.

[0378] Coexpression of the inducible Caspase-9 constructs of the expected size with the marker gene GFP in transfected 293T cells was demonstrated by Western blot using a Caspase-9 antibody specific for amino acid residues 299-318, present both in the full-length and truncated Caspase molecules as well as a GFP-specific antibody. Western blots were performed as presented herein.

[0379] Transfected 293T cells were resuspended in lysis buffer (50% Tris/Gly, 10% sodium dodecyl sulfate [SDS], 4% beta-mercaptoethanol, 10% glycerol, 12% water, 4% bromophenol blue at 0.5%) containing aprotinin, leupeptin, and phenylmethylsulfonyl fluoride (Boehringer, Ingelheim, Germany) and incubated for 30 minutes on ice. After a 30-minute centrifugation, supernatant was harvested; mixed 1:2 with Laemmli buffer (Bio-Rad, Hercules, Calif.), boiled and loaded on a 10% SDS—polyacrylamide gel. The membrane was probed with rabbit anti-Caspase-9 (amino acid residues 299-3 18) immunoglobulin G (IgG; Affinity BioReagents, Golden, Colo.; 1:500 dilution) and with mouse anti-GFP IgG (Covance, Berkeley, Calif.; 1:25,000 dilution). Blots were then exposed to appropriate peroxidase-coupled secondary antibodies and protein expression was detected with enhanced chemiluminescence (ECL; Amersham, Arlington Heights, Ill.). The membrane was then stripped and reprobed with goat polyclonal antiactin (Santa Cruz Biotechnology; 1:500 dilution) to check equality of loading.

[0380] Additional smaller size bands, seem in FIG. 1B, likely represent degradation products. Degradation products for the F′F-C-Casp9 and F′F-Casp9 constructs may not be detected due to a lower expression level of these constructs as a result of their basal activity. Equal loading of each sample was confirmed by the substantially equal amounts of actin shown at the bottom of each lane of the western blot, indicating substantially similar amounts of protein were loaded in each lane.

[0381] An example of a chimeric polypeptide that may be expressed in the modified cells is provided herein. In this example, a single polypeptide is encoded by the nucleic acid vector. The inducible Caspase-9 polypeptide is separated from the CAR polypeptide during translation, due to skipping of a peptide bond. (Donnelly, M L 2001, J. Gen. Virol. 82:1013-25).

[0382] Evaluation of Caspase-9 Suicide Switch Expression Constructs.

### Cell Lines

[0383] B 95-8 EBV transformed B-cell lines (LCLs), Jurkat, and MT-2 cells (kindly provided by Dr S. Marriott, Baylor College of Medicine, Houston, Tex.) were cultured in RPMI 1640 (Hyclone, Logan, Utah) containing 10% fetal bovine serum (FBS; Hyclone). Polyclonal EBV-specific T-cell lines were cultured in 45% RPMI/45% Clicks (Irvine Scientific, Santa Ana, Calif.)/10% FBS and generated as previously reported. Briefly, peripheral blood mononuclear cells (2×10⁶ per well of a 24-well plate) were stimulated with autologous LCLs irradiated at 4000 rads at a responder-to-stimulator (R/S) ratio of 40:1. After 9 to 12 days, viable cells were restimulated with irradiated LCLs at an R/S ratio of 4:1. Subsequently, cytotoxic T cells (CTLs) were expanded by weekly restimulation with LCLs in the presence of 40 U/mL to 100 U/mL recombinant human interleukin-2 (rhIL-2; Proleukin; Chiron, Emeryville, Calif.).

### Retrovirus Transduction

[0384] For the transient production of retrovirus, 293T cells were transfected with iCasp9/iFas constructs, along with plasmids encoding gag-pol and RD 114 envelope using GeneJuice transfection reagent (Novagen, Madison, Wis.). Virus was harvested 48 to 72 hours after transfection, snap frozen, and stored at ˜80° C. until use. A stable FLYRD 18-derived retroviral producer line was generated by multiple transductions with VSV-G pseudotyped transient retroviral supernatant. FLYRD18 cells with highest transgene expression were single-cell sorted, and the clone that produced the highest virus titer was expanded and used to produce virus for lymphocyte transduction. The transgene expression, function, and retroviral titer of this clone was maintained during continuous culture for more than 8 weeks. For transduction of human lymphocytes, a non-tissue-culture-treated 24-well plate (Becton Dickinson, San Jose, Calif.) was coated with recombinant fibronectin fragment (FN CH-296; Retronectin; Takara Shuzo, Otsu, Japan; 4 μg/mL in PBS, overnight at 4° C.) and incubated twice with 0.5 mL retrovirus per well for 30 minutes at 37° C. Subsequently, 3×10⁵ to 5×10⁵ T cells per well were transduced for 48 to 72 hours using 1 mL virus per well in the presence of 100 U/mL IL-2. Transduction efficiency was determined by analysis of expression of the coexpressed marker gene green fluorescent protein (GFP) on a FACScan flow cytometer (Becton Dickinson). For functional studies, transduced CTLs were either non-selected or segregated into populations with low, intermediate, or high GFP expression using a MoFlo cytometer (Dako Cytomation, Ft Collins, Colo.) as indicated.

[0385] Induction and Analysis of Apoptosis

[0386] CID (AP20187; ARIAD Pharmaceuticals) at indicated concentrations was added to transfected 293T cells or transduced CTLs. Adherent and nonadherent cells were harvested and washed with annexin binding buffer (BD Pharmingen, San Jose, Calif.). Cells were stained with annexin-V and 7-amino-actinomycin D (7-AAD) for 15 minutes according to the manufacturer's instructions (BD Pharmingen). Within 1 hour after staining, cells were analyzed by flow cytometry using CellQuest software (Becton Dickinson).

### Cytotoxicity Assay

[0387] The cytotoxic activity of each CTL line was evaluated in a standard 4-hour ⁵¹Cr release assay, as previously presented. Target cells included autologous LCLs, human leukocyte antigen (HLA) class I-mismatched LCLs and the lymphokine-activated killer cell-sensitive T-cell lymphoma line HSB-2. Target cells incubated in complete medium or 1% Triton X-100 (Sigma, St Louis, Mo.) were used to determine spontaneous and maximum ⁵¹Cr release, respectively. The mean percentage of specific lysis of triplicate wells was calculated as 100×(experimental release−spontaneous release)/(maximal release−spontaneous release).

### Phenotyping

[0388] Cell-surface phenotype was investigated using the following monoclonal antibodies: CD3, CD4, CD8 (Becton Dickinson) and CD56 and TCR-α/β (Immunotech, Miami, Fla.). LNGFR-iFas was detected using anti-NGFR antibody (Chromaprobe, Aptos, Calif.). Appropriate matched isotype controls (Becton Dickinson) were used in each experiment. Cells were analyzed with a FACSscan flow cytometer (Becton Dickinson).

### Analysis of Cytokine Production

[0389] The concentration of interferon-γ (IFN-γ), IL-2, IL-4, IL-5, IL-10, and tumor necrosis factor-α (TNFα) in CTL culture supernatants was measured using the Human Th1/Th2 cytokine cytometric Bead Array (BD Pharmingen) and the concentration of IL-12 in the culture supernatants was measured by enzyme-linked immunosorbent assay (ELISA; R&D Systems, Minneapolis, Minn.) according to the instructions of the manufacturer.

### In Vivo Experiments

[0390] Non-obese diabetic severe combined immunodeficient (NOD/SCID) mice, 6 to 8 weeks of age, were irradiated (250 rad) and injected subcutaneously in the right flank with 10×10⁶ to 15×10⁶ LCLs resuspended in Matrigel (BD Bioscience). Two weeks later mice bearing tumors that were approximately 0.5 cm in diameter were injected into the tail vein with a 1:1 mixture of nontransduced and iCasp9.I.GFPhigh-transduced EBV CTLs (total 15×10⁶). At 4 to 6 hours prior and 3 days after CTL infusion, mice were injected intraperitoneally with recombinant hIL-2 (2000 U; Proleukin; Chiron). On day 4, the mice were randomly segregated in 2 groups: 1 group received CID (50 μg AP20187, intraperitoneally) and 1 group received carrier only (16.7% propanediol, 22.5% PEG400, and 1.25% Tween 80, intraperitoneally). On day 7, all mice were killed. Tumors were homogenized and stained with antihuman CD3 (BD Pharmingen). By FACS analysis, the number of GFP+ cells within the gated CD3⁺ population was evaluated. Tumors from a control group of mice that received only nontransduced CTLs (total 15×10⁶) were used as a negative control in the analysis of CD3⁺/GFP⁺ cells.

### Optimization of Expression and Function of Inducible Caspase-9

[0391] Caspases 3, 7, and 9 were screened for their suitability as inducible safety-switch molecules both in transfected 293T cells and in transduced human T cells. Only inducible Caspase-9 (iCasp9) was expressed at levels sufficient to confer sensitivity to the chosen CID (e.g., chemical inducer of dimerization). An initial screen indicated that the full length iCasp9 could not be maintained stably at high levels in T cells, possibly due to transduced cells being eliminated by the basal activity of the transgene. The CARD domain is involved in physiologic dimerization of Caspase-9 molecules, by a cytochrome C and adenosine triphosphate (ATP)-driven interaction with apoptotic protease-activating factor 1 (Apaf-1). Because of the use of a CID to induce dimerization and activation of the suicide switch, the function of the CARD domain is superfluous in this context and removal of the CARD domain was investigated as a method of reducing basal activity. Given that only dimerization rather than multimerization is required for activation of Caspase-9, a single FKBP12v36 domain also was investigated as a method to effect activation.

[0392] The activity of the resultant truncated and/or modified forms of Caspase-9 (e.g., the CARD domain, or one of the 2 FKBP domains, or both, are removed) were compared. A construct with a disrupted activation site, F′F-C-Casp9_{C->S}, provided a nonfunctional control (see FIG. 1A). All constructs were cloned into the retroviral vector MSCV²⁶ in which retroviral long terminal repeats (LTRs) direct transgene expression and enhanced GFP is coexpressed from the same mRNA by use of an internal ribosomal entry site (IRES). In transfected 293T cells, expression of all inducible Caspase-9 constructs at the expected size as well as coexpression of GFP was demonstrated by Western blot (see FIG. 1B). Protein expression (estimated by mean fluorescence of GFP and visualized on Western blot) was highest in the nonfunctional construct F′F-C-Casp9_{C->S} and greatly diminished in the full-length construct F′F-C-Casp9. Removal of the CARD (F′F-Casp9), one FKBP (F-C-Casp9), or both (F-Casp9) resulted in progressively higher expression of both inducible Caspase-9 and GFP, and correspondingly enhanced sensitivity to CID (see FIG. 1A). Based on these results, the F-Casp9 construct (henceforth referred to as iCasp9_{M}) was used for further study in human T lymphocytes.

Stable Expression of iCasp9_{M} in Human T Lymphocytes

[0393] The long-term stability of suicide gene expression is of utmost importance, since suicide genes must be expressed for as long as the genetically engineered cells persist. For T-cell transduction, a FLYRD18-derived retroviral producer clone that produces high-titer RD114-pseudotyped virus was generated to facilitate the transduction of T cells. iCasp9_{M} expression in EBV-specific CTL lines (EBV-CTL) was evaluated since EBV-specific CTL lines have well-characterized function and specificity and are already being used as in vivo therapy for prevention and treatment of EBV-associated malignancies. Consistent transduction efficiencies of EBV-CTLs of more than 70% (mean, 75.3%; range, 71.4%-83.0% in 5 different donors) were obtained after a single transduction with retrovirus. The expression of iCasp9_{M} in EBV-CTLs was stable for at least 4 weeks after transduction without selection or loss of transgene function.

iCasp9_{M} does not Alter Transduced T-Cell Characteristics

[0394] To ensure that expression of iCasp9_{M} did not alter T-cell characteristics, the phenotype, antigen-specificity, proliferative potential, and function of nontransduced or nonfunctional iCasp9_{C->S}-transduced EBV-CTLs was compared with that of iCasp9_{M}-transduced EBV-CTLs. In 4 separate donors, transduced and nontransduced CTLs consisted of equal numbers of CD4⁺, CD8⁺, CD56⁺, and TCR α/β+ cells. Similarly, production of cytokines including IFN-γ, TNFα, IL-10, IL-4, IL-5, and IL-2 was unaltered by iCasp9_{M} expression. iCasp9_{M}-transduced EBV-CTLs specifically lysed autologous LCLs comparable to nontransduced and control-transduced CTLs. Expression of iCasp9M did not affect the growth characteristics of exponentially growing CTLs, and importantly, dependence on antigen and IL-2 for proliferation was preserved On day 21 after transduction the normal weekly antigenic stimulation with autologous LCLs and IL-2 was continued or discontinued. Discontinuation of antigen stimulation resulted in a steady decline of T cells.

Elimination of More than 99% of T Lymphocytes Selected for High Transgene Expression In Vitro

[0395] Inducible iCasp9_{M} proficiency in CTLs was tested by monitoring loss of GFP-expressing cells after administration of CID; 91.3% (range, 89.5%-92.6% in 5 different donors) of GFP⁺ cells were eliminated after a single 10-nM dose of CID. Similar results were obtained regardless of exposure time to CID (range, 1 hour-continuous). In all experiments, CTLs that survived CID treatment had low transgene expression with a 70% (range, 55%-82%) reduction in mean fluorescence intensity of GFP after CID. No further elimination of the surviving GFP⁺ T cells could be obtained by an antigenic stimulation followed by a second 10-nM dose of CID. Therefore, the non-responding CTLs most likely expressed insufficient iCasp9_{M} for functional activation by CID. To investigate the correlation between low levels of expression and CTL non-response to CID, CTLs were sorted for low, intermediate, and high expression of the linked marker gene GFP and mixed 1:1 with nontransduced CTLs from the same donor to allow for an accurate quantitation of the number of transduced T cells responding to CID-induced apoptosis.

[0396] The number of transduced T cells eliminated increased with the level of GFP transgene expression (see FIGS. 4A, 4B and 4C). To determine the correlation between transgene expression and function of iCasp9_{M}, iCasp9_{M} IRES.GFP-transduced EBV-CTL were selected for low (mean 21), intermediate (mean 80) and high (mean 189) GFP expression. Selected T-cells were incubated overnight with 10 nM CID and subsequently stained with annexin V and 7-AAD. Indicated are the percentages of annexin V+/7-AAD− and annexin V+/7-AAD+T−. Selected T-cells were mixed 1:1 with non-transduced T-cells and incubated with 10 nM CID following antigenic stimulation. Indicated is the percentage of residual GFP-positive T-cells on day 7.

[0397] For GFP_{high}-selected cells, 10 nM CID led to deletion of 99.1% (range, 98.7%-99.4%) of transduced cells. On the day of antigen stimulation, F-Casp9_{M}.I.GFP-transduced CTLs were either untreated or treated with 10 nM CID. Seven days later, the response to CID was measured by flow cytometry for GFP. The percentage of transduced T cells was adjusted to 50% to allow for an accurate measurement of residual GFP⁺ cells after CID treatment. The responses to CID in unselected (top row of and GFP_{high}-selected CTLs (bottom row of was compared. The percentage of residual GFP+ cells is indicated.

[0398] Rapid induction of apoptosis in the GFP_{high}-selected cells is demonstrated by apoptotic characteristics such as cell shrinkage and fragmentation within 14 hours of CID administration (see After overnight incubation with 10 nM CID, F-Casp9_{M}.I.GFP_{high}-transduced T cells had apoptotic characteristics such as cell shrinkage and fragmentation by microscopic evaluation. Of the T cells selected for high expression, 64% (range, 59%-69%) had an apoptotic (annexin-V⁺+/7-AAD⁻) and 30% (range, 26%-32%) had a necrotic (annexinV⁺/7-AAD⁺) phenotype. Staining with markers of apoptosis showed that 64% of T cells had an apoptotic phenotype (annexin V⁺, 7-AAD⁻, lower right quadrant) and 32% a necrotic phenotype (annexin V⁺, 7-AAD⁺, upper right quadrant). A representative example of 3 separate experiments is shown.

[0399] In contrast, the induction of apoptosis was significantly lower in T cells selected for intermediate or low GFP expression (see FIGS. 4A, 4B and 4C). For clinical applications therefore, versions of the expression constructs with selectable markers that allow selection for high copy number, high levels of expression, or both high copy number and high levels of expression may be desirable. CID-induced apoptosis was inhibited by the panCaspase inhibitor zVAD-fmk (100 μM for 1 hour prior to adding CID. Titration of CID showed that 1 nM CID was sufficient to obtain the maximal deletion effect. A dose-response curve using the indicated amounts of CID (AP20187) shows the sensitivity of F-Casp9_{M}.I.GFP_{high} to CID. Survival of GFP+ cells is measured on day 7 after administration of the indicated amount of CID. The mean and standard deviation for each point are given. Similar results were obtained using another chemical inducer of dimerization (CID), AP1903, which was clinically shown to have substantially no adverse effects when administered to healthy volunteers. The dose response remained unchanged for at least 4 weeks after transduction.

iCasp9_{M} is Functional in Malignant Cells that Express Antiapoptotic Molecules

[0400] Caspase-9 was selected as an inducible proapoptotic molecule for clinical use rather than previously presented iFas and iFADD, because Caspase-9 acts relatively late in apoptosis signaling and therefore is expected to be less susceptible to inhibition by apoptosis inhibitors. Thus, suicide function should be preserved not only in malignant, transformed T-cell lines that express antiapoptotic molecules, but also in subpopulations of normal T cells that express elevated antiapoptotic molecules as part of the process to ensure long-term preservation of memory cells. To further investigate the hypothesis, the function of iCasp9_{M} and iFas was first compared in EBV-CTLs. To eliminate any potential vector based difference, inducible Fas also was expressed in the MSCV.IRES.GFP vector, like iCasp9. For these experiments both ΔNGFR.iFas.I.GFP and iCasp9_{M}.I.GFP-transduced CTLs were sorted for GFP_{high} expression and mixed with nontransduced CTLs at a 1:1 ratio to obtain cell populations that expressed either iFas or iCasp9_{M} at equal proportions and at similar levels The EBV-CTLs were sorted for high GFP expression and mixed 1:1 with nontransduced CTLs as presented. The percentages of ΔNGFR⁺/GFP⁺ and GFP⁺ T cells are indicated.

[0401] Elimination of GFP⁺ cells after administration of 10 nM CID was more rapid and more efficient in iCasp9_{M} than in iFas-transduced CTLs (99.2%+/−0.14% of iCasp9_{M}-transduced cells compared with 89.3%+/−4.9% of iFas-transduced cells at day 7 after CID; P<0.05). On the day of LCL stimulation, 10 nM CID was administered, and GFP was measured at the time points indicated to determine the response to CID. Black diamonds represent data for ΔNGFR-iFas.I.GFP; black squares represent data for iCasp9_{M}.I.GFP. Mean and standard deviation of 3 experiments are shown.

[0402] The function of iCasp9M and iFas was also compared in 2 malignant T-cell lines: Jurkat, an apoptosis-sensitive T-cell leukemia line, and MT-2, an apoptosis-resistant T-cell line, due to c-FLIP and bcl-xL expression. Jurkat cells and MT-2 cells were transduced with iFas and iCasp9_{M} with similar efficiencies (92% vs 84% in Jurkat, 76% vs 70% in MT-2) and were cultured in the presence of 10 nM CID for 8 hours. Annexin-V staining showed that although iFas and iCasp9_{M} induced apoptosis in an equivalent number of Jurkat cells (56.4%+/−15.6% and 57.2%+1-18.9%, respectively), only activation of iCasp9_{M} resulted in apoptosis of MT-2 cells (19.3%+/−8.4% and 57.9%+/−11.9% for iFas and iCasp9_{M}, respectively; see FIG. 5C).

[0403] The human T-cell lines Jurkat (left) and MT-2 (right) were transduced with ΔNGFR-iFas.I.GFP or iCasp9_{M}.I.GFP. An equal percentage of T cells were transduced with each of the suicide genes: 92% for ΔNGFR-iFas.I.GFP versus 84% for iCasp9_{M}.I.GFP in Jurkat, and 76% for ΔNGFR-iFas.I.GFP versus 70% for iCasp9_{M}.I.GFP in MT-2. T cells were either nontreated or incubated with 10 nM CID. Eight hours after exposure to CID, apoptosis was measured by staining for annexin V and 7-AAD. A representative example of 3 experiments is shown. PE indicates phycoerythrin. These results demonstrate that in T cells overexpressing apoptosis-inhibiting molecules, the function of iFas can be blocked, while iCasp9_{M} can still effectively induce apoptosis.

iCasp9M-Mediated Elimination of T Cells Expressing an Immunomodulatory Transgene

[0404] To determine whether iCasp9M could effectively destroy cells genetically modified to express an active transgene product, the ability of iCasp9_{M} to eliminate EBV-CTLs stably expressing IL-12 was measured. While IL-12 was undetectable in the supernatant of nontransduced and iCasp9_{M}.IRES.GFP-transduced CTLs, the supernatant of iCasp9_{M}.IRES.IL-12-transduced cells contained 324 pg/mL to 762 pg/mL IL-12. After administration of 10 nM CID, however, the IL-12 in the supernatant fell to undetectable levels (<7.8 μg/mL). Thus, even without prior sorting for high transgene expressing cells, activation of iCasp9_{M} is sufficient to completely eliminate all T cells producing biologically relevant levels of IL-12. The marker gene GFP in the iCasp9_{M}.I.GFP constructs was replaced by flexi IL-12, encoding the p40 and p35 subunits of human IL-12. iCasp9_{M}.I.GFP- and iCasp9_{M}.I.IL-12-transduced EBV-CTLs were stimulated with LCLs, and then left untreated or exposed to 10 nM CID. Three days after a second antigenic stimulation, the levels of IL-12 in the culture supernatant were measured by IL-12 ELISA (detection limit of this assay is 7.8 pg/mL). The mean and standard deviation of triplicate wells are indicated. Results of 1 of 2 experiments with CTLs from 2 different donors are shown.

Elimination of More than 99% of T Cells Selected for High Transgene Expression In Vivo

[0405] The function of iCasp9_{M} also was evaluated in transduced EBV-CTLs in vivo. A SCID mouse-human xenograft model was used for adoptive immunotherapy. After intravenous infusion of a 1:1 mixture of nontransduced and iCasp9_{M}.IRES.GFP_{high}-transduced CTLs into SCID mice bearing an autologous LCL xenograft, mice were treated either with a single dose of CID or carrier only. Three days after CID/carrier administration, tumors were analyzed for human CD3⁺/GFP⁺ cells. Detection of the nontransduced component of the infusion product, using human anti-CD3 antibodies, confirmed the success of the tail-vein infusion in mice that received CID. In mice treated with CID, there was more than a 99% reduction in the number of human CD3+/GFP+ T cells, compared with infused mice treated with carrier alone, demonstrating equally high sensitivity of iCasp9_{M}-transduced T cells in vivo and in vitro.

[0406] The function of iCasp9_{M} in vivo, was assayed. NOD/SCID mice were irradiated and injected subcutaneously with 10×10⁶ to 15×10⁶ LCLs. After 14 days, mice bearing tumors of 0.5 cm in diameter received a total of 15×10⁶ EBV-CTLs (50% of these cells were nontransduced and 50% were transduced with iCasp9_{M}.I.GFP and sorted for high GFP expression). On day 3 after CTL administration, mice received either CID (50 μg AP20187; (black diamonds, n=6) or carrier only (black squares, n=5) and on day 6 the presence of human CD3+/GFP+ T cells in the tumors was analyzed. Human CD3+ T cells isolated from the tumors of a control group of mice that received only nontransduced CTLs (15×10⁶ CTLs; n=4) were used as a negative control for the analysis of CD3+/GFP+ T cells within the tumors.

### Discussion

[0407] Presented herein are expression vectors expressing suicide genes suitable for eliminating gene-modified T cells in vivo, in some embodiments. Suicide gene expression vectors presented herein have certain non-limiting advantageous features including stable coexpression in all cells carrying the modifying gene, expression at levels high enough to elicit cell death, low basal activity, high specific activity, and minimal susceptibility to endogenous antiapoptotic molecules. Presented herein, in certain embodiments, is an inducible Caspase-9, iCasp9_{M}, which has low basal activity allowing stable expression for more than 4 weeks in human T cells. A single 10-nM dose of a small molecule chemical inducer of dimerization (CID) is sufficient to kill more than 99% of iCasp9_{M}-transduced cells selected for high transgene expression both in vitro and in vivo. Moreover, when coexpressed with Th1 cytokine IL-12, activation of iCasp9_{M} eliminated all detectable IL-12-producing cells, even without selection for high transgene expression. Caspase-9 acts downstream of most antiapoptotic molecules, therefore, a high sensitivity to CID is preserved regardless of the presence of increased levels of antiapoptotic molecules of the bcl-2 family. Thus, iCasp9_{M} also may prove useful for inducing destruction even of transformed T cells and memory T cells that are relatively resistant to apoptosis.

[0408] Unlike other Caspase molecules, proteolysis does not appear sufficient for activation of Caspase-9. Crystallographic and functional data indicate that dimerization of inactive Caspase-9 monomers leads to conformational change-induced activation. The concentration of pro-Caspase-9, in a physiologic setting, is in the range of about 20 nM, well below the threshold needed for dimerization.

[0409] Without being limited by theory, it is believed the energetic barrier to dimerization can be overcome by homophilic interactions between the CARD domains of Apaf-1 and Caspase-9, driven by cytochrome C and ATP. Overexpression of Caspase-9 joined to 2 FKBPs may allow spontaneous dimerization to occur and can account for the observed toxicity of the initial full length Caspase-9 construct. A decrease in toxicity and an increase in gene expression was observed following removal of one FKBP, most likely due to a reduction in toxicity associated with spontaneous dimerization. While multimerization often is involved in activation of surface death receptors, dimerization of Caspase-9 should be sufficient to mediate activation. Data presented herein indicates that iCasp9 constructs with a single FKBP function as effectively as those with 2 FKBPs. Increased sensitivity to CID by removal of the CARD domain may represent a reduction in the energetic threshold of dimerization upon CID binding.

[0410] The persistence and function of virus- or bacteria-derived lethal genes, such as HSV-TK and cytosine deaminase, can be impaired by unwanted immune responses against cells expressing the virus or bacteria derived lethal genes. The FKBPs and proapoptotic molecules that form the components of iCasp9_{M} are human-derived molecules and are therefore less likely to induce an immune response. Although the linker between FKBP and Caspase-9 and the single point mutation in the FKBP domain introduce novel amino acid sequences, the sequences were not immunologically recognized by macaque recipients of iFas-transduced T cells. Additionally, because the components of iCasp9_{M} are human-derived molecules, no memory T cells specific for the junction sequences should be present in a recipient, unlike virus-derived proteins such as HSV-TK, thereby reducing the risk of immune response-mediated elimination of iCasp9_{M}-transduced T cells. Previous studies using inducible Fas or the death effector domains (DED) of Fas associated death domain proteins (FADD) showed that approximately 10% of transduced cells were unresponsive to activation of the destructive gene. As observed in experiments presented here, a possible explanation for unresponsiveness to CID is low expression of the transgene. The iCasp9_{M}-transduced T cells in our study and iFas-transduced T cells in studies by others that survived after CID administration had low levels of transgene expression. In an attempt to overcome a perceived retroviral “positional effect”, increased levels of homogeneous expression of the transgene were achieved by flanking retroviral integrants with the chicken beta-globin chromatin insulator. Addition of the chromatin insulator dramatically increased the homogeneity of expression in transduced 293T cells, but had no significant effect in transduced primary T cell. Selection of T cells with high expression levels minimized variability of response to the dimerizer. Over 99% of transduced T cells sorted for high GFP expression were eliminated after a single 10-nM CID dose. This demonstration supports the hypothesis that cells expressing high levels of suicide gene can be isolated using a selectable marker.

[0411] A very small number of resistant residual cells may cause a resurgence of toxicity, a deletion efficiency of up to 2 logs will significantly decrease this possibility. For clinical use, coexpression with a nonimmunogenic selectable marker such as truncated human NGFR, CD20, or CD34 (e.g., instead of GFP) will allow for selection of high transgene-expressing T cells. Coexpression of the suicide switch (e.g., iCASP9_{M}) and a suitable selectable marker (e.g., truncated human NGFR, CD20, CD34, the like and combinations thereof) can be obtained using either an internal ribosome entry site (IRES) or posttranslational modification of a fusion protein containing a self-cleaving sequence (eg, 2A). In contrast, in situations where the sole safety concern is the transgene-mediated toxicity (eg, artificial T-cell receptors, cytokines, the like or combinations thereof), this selection step may be unnecessary, as tight linkage between iCasp9_{M} and transgene expression enables elimination of substantially all cells expressing biologically relevant levels of the therapeutic transgene. This was demonstrated by coexpressing iCasp9_{M} with IL-12. Activation of iCasp9_{M} substantially eliminated any measurable IL-12 production. The success of transgene expression and subsequent activation of the “suicide switch” may depend on the function and the activity of the transgene.

[0412] Another possible explanation for unresponsiveness to CID is that high levels of apoptosis inhibitors may attenuate CID-mediated apoptosis. Examples of apoptosis inhibitors include c-FLIP, bcl-2 family members and inhibitors of apoptosis proteins (IAPs), which normally regulate the balance between apoptosis and survival. For instance, upregulation of c-FLIP and bcl-2 render a subpopulation of T cells, destined to establish the memory pool, resistant to activation-induced cell death in response to cognate target or antigen-presenting cells. In several T-lymphoid tumors, the physiologic balance between apoptosis and survival is disrupted in favor of cell survival. A suicide gene should delete substantially all transduced T cells including memory and malignantly transformed cells. Therefore, the chosen inducible suicide gene should retain a significant portion if not substantially all of its activity in the presence of increased levels of antiapoptotic molecules.

[0413] The apical location of iFas (or iFADD) in the apoptosis signaling pathway may leave it especially vulnerable to inhibitors of apoptosis, thus making these molecules less well suited to being the key component of an apoptotic safety switch. Caspase 3 or 7 would seem well suited as terminal effector molecules; however neither could be expressed at functional levels in primary human T cells. Therefore Caspase-9, was chosen as the suicide gene, because Capsase-9 functions late enough in the apoptosis pathway that it bypasses the inhibitory effects of c-FLIP and antiapoptotic bcl-2 family members, and Caspase-9 also could be expressed stably at functional levels. Although X-linked inhibitor of apoptosis (XIAP) could in theory reduce spontaneous Caspase-9 activation, the high affinity of AP20187 (or AP1903) for FKBPᵥ₃₆ may displace this noncovalently associated XIAP. In contrast to iFas, iCasp9_{M} remained functional in a transformed T-cell line that overexpresses antiapoptotic molecules, including bcl-xL.

[0414] Presented herein is an inducible safety switch, designed specifically for expression from an oncoretroviral vector by human T cells. iCasp9_{M} can be activated by AP1903 (or analogs), a small chemical inducer of dimerization that has proven safe at the required dose for optimum deletional effect, and unlike ganciclovir or rituximab has no other biologic effects in vivo. Therefore, expression of this suicide gene in T cells for adoptive transfer can increase safety and also may broaden the scope of clinical applications.

### Example 2

### Using the iCasp9 Suicide Gene to Improve the Safety of Allodepleted T Cells after Haploidentical Stem Cell Transplantation

[0415] Presented in this example are expression constructs and methods of using the expression constructs to improve the safety of allodepleted T cells after haploidentical stem cell transplantation. A retroviral vector encoding iCasp9 and a selectable marker (truncated CD19) was generated as a safety switch for donor T cells. Even after allodepletion (using anti-CD25 immunotoxin), donor T cells could be efficiently transduced, expanded, and subsequently enriched by CD19 immunomagnetic selection to >90% purity. The engineered cells retained anti-viral specificity and functionality, and contained a subset with regulatory phenotype and function. Activating iCasp9 with a small-molecule dimerizer rapidly produced >90% apoptosis. Although transgene expression was downregulated in quiescent T cells, iCasp9 remained an efficient suicide gene, as expression was rapidly upregulated in activated (alloreactive) T cells.

### Materials and Methods

### Generation of Allodepleted T Cells

[0416] Allodepleted cells were generated from healthy volunteers as previously presented. Briefly, peripheral blood mononuclear cells (PBMCs) from healthy donors were co-cultured with irradiated recipient Epstein Barr virus (EBV)-transformed lymphoblastoid cell lines (LCL) at responder-to-stimulator ratio of 40:1 in serum-free medium (AIM V; Invitrogen, Carlsbad, Calif.). After 72 hours, activated T cells that expressed CD25 were depleted from the co-culture by overnight incubation in RFT5-SMPT-dgA immunotoxin. Allodepletion was considered adequate if the residual CD3⁺CD25⁺ population was <1% and residual proliferation by 3H-thymidine incorporation was <10%.

### Plasmid and Retrovirus

[0417] SFG.iCasp9.2A.CD19 consists of inducible Caspase-9 (iCasp9) linked, via a cleavable 2A-like sequence, to truncated human CD19. iCasp9 consists of a human FK5 06-binding protein (FKBP12; GenBank AH002 818) with an F36V mutation, connected via a Ser-Gly-Gly-Gly-Ser linker (SEQ ID NO: 286) to human Caspase-9 (CASP9; GenBank NM 001229). The F36V mutation increases the binding affinity of FKBP12 to the synthetic homodimerizer, AP20187 or AP1903. The Caspase recruitment domain (CARD) has been deleted from the human Caspase-9 sequence because its physiological function has been replaced by FKBP12, and its removal increases transgene expression and function. The 2A-like sequence encodes an 20 amino acid peptide from Thosea asigna insect virus, which mediates >99% cleavage between a glycine and terminal proline residue, resulting in 19 extra amino acids in the C terminus of iCasp9, and one extra proline residue in the N terminus of CD19. CD19 consists of full-length CD19 (GenBank NM 001770) truncated at amino acid 333 (TDPTRRF (SEQ ID NO: 290)), which shortens the intracytoplasmic domain from 242 to 19 amino acids, and removes all conserved tyrosine residues that are potential sites for phosphorylation.

[0418] A stable PG13 clone producing Gibbon ape leukemia virus (Gal-V) pseudotyped retrovirus was made by transiently transfecting Phoenix Eco cell line (ATCC product #5D3444; ATCC, Manassas, Va.) with SFG.iCasp9.2A.CD19. This produced Eco-pseudotyped retrovirus. The PG13 packaging cell line (ATCC) was transduced three times with Eco-pseudotyped retrovirus to generate a producer line that contained multiple SFG.iCasp9.2A.CD19 proviral integrants per cell. Single cell cloning was performed, and the PG13 clone that produced the highest titer was expanded and used for vector production.

### Retro Viral Transduction

[0419] Culture medium for T cell activation and expansion consisted of 45% RPMI 1640 (Hyclone, Logan, Utah), 45% Clicks (Irvine Scientific, Santa Ana, Calif.) and 10% fetal bovine serum (FBS; Hyclone). Allodepleted cells were activated by immobilized anti-CD3 (OKT3; Ortho Biotech, Bridgewater, N.J.) for 48 hours before transduction with retroviral vector. Selective allodepletion was performed by co-culturing donor PBMC with recipient EBV-LCL to activate alloreactive cells: activated cells expressed CD25 and were subsequently eliminated by anti-CD25 immunotoxin. The allodepleted cells were activated by OKT3 and transduced with the retroviral vector 48 hours later. Immunomagnetic selection was performed on day 4 of transduction; the positive fraction was expanded for a further 4 days and cryopreserved.

[0420] In small-scale experiments, non-tissue culture-treated 24-well plates (Becton Dickinson, San Jose, Calif.) were coated with OKT3 1 g/ml for 2 to 4 hours at 37° C. Allodepleted cells were added at 1×10⁶ cells per well. At 24 hours, 100 U/ml of recombinant human interleukin-2 (IL-2) (Proleukin; Chiron, Emeryville, Calif.) was added. Retroviral transduction was performed 48 hours after activation. Non-tissue culture-treated 24-well plates were coated with 3.5 μg/cm² recombinant fibronectin fragment (CH-296; Retronectin; Takara Mirus Bio, Madison, Wis.) and the wells loaded twice with retroviral vector-containing supernatant at 0.5 ml per well for 30 minutes at 37° C., following which OKT3-activated cells were plated at 5×10⁵ cells per well in fresh retroviral vector-containing supernatant and T cell culture medium at a ratio of 3:1, supplemented with 100U/ml IL-2. Cells were harvested after 2 to 3 days and expanded in the presence of 50 U/ml IL-2.

### Scaling-Up Production of Gene-Modified Allodepleted Cells

[0421] Scale-up of the transduction process for clinical application used non-tissue culture-treated T75 flasks (Nunc, Rochester, N.Y.), which were coated with 10 ml of OKT3 1 μg/ml or 10 ml of fibronectin 7 μg/ml at 4° C. overnight. Fluorinated ethylene propylene bags corona-treated for increased cell adherence (2PF-0072AC, American Fluoroseal Corporation, Gaithersburg, Md.) were also used. Allodepleted cells were seeded in OKT3-coated flasks at 1×10⁶ cells/ml. 100U/ml IL-2 was added the next day. For retroviral transduction, retronectin-coated flasks or bags were loaded once with 10 ml of retrovirus-containing supernatant for 2 to 3 hours. OKT3-activated T cells were seeded at 1×10⁶ cells/ml in fresh retroviral vector-containing medium and T cell culture medium at a ratio of 3:1, supplemented with 100U/ml IL-2. Cells were harvested the following morning and expanded in tissue-culture treated T75 or T175 flasks in culture medium supplemented with between about 50 to 100 U/ml IL-2 at a seeding density of between about 5×10⁵ cells/ml to 8×10⁵ cells/ml.

### CD19 Immunomagnetic Selection

[0422] Immunomagnetic selection for CD19 was performed 4 days after transduction. Cells were labeled with paramagnetic microbeads conjugated to monoclonal mouse anti-human CD19 antibodies (Miltenyi Biotech, Auburn, Calif.) and selected on MS or LS columns in small scale experiments and on a CliniMacs Plus automated selection device in large scale experiments. CD19-selected cells were expanded for a further 4 days and cryopreserved on day 8 post transduction. These cells were referred to as “gene-modified allodepleted cells”.

### Immunophenotyping and Pentamer Analysis

[0423] Flow cytometric analysis (FACSCalibur and CellQuest software; Becton Dickinson) was performed using the following antibodies: CD3, CD4, CD8, CD19, CD25, CD27, CD28, CD45RA, CD45RO, CD56 and CD62L. CD19-PE (Clone 4G7; Becton Dickinson) was found to give optimum staining and was used in all subsequent analysis. A Non-transduced control was used to set the negative gate for CD19. An HLA-pentamer, HLA-B8-RAKFKQLL (SEQ ID NO: 287) (Proimmune, Springfield, Va.) was used to detect T cells recognizing an epitope from EBV lytic antigen (BZLF1). HLA-A2-NLVPMVATV (SEQ ID NO: 288) pentamer was used to detect T cells recognizing an epitope from CMV-pp65 antigen.

### Interferon-ELISpot Assay for Anti-Viral Response

[0424] Interferon-ELISpot for assessment of responses to EBV, CMV and adenovirus antigens was performed using known methods. Gene-modified allodepleted cells cryopreserved at 8 days post transduction were thawed and rested overnight in complete medium without IL-2 prior to use as responder cells. Cryopreserved PBMCs from the same donor were used as comparators. Responder cells were plated in duplicate or triplicate in serial dilutions of 2×10⁵, 1×10⁵, 5×10⁴ and 2.5×10⁴ cells per well. Stimulator cells were plated at 1×10⁵ per well. For response to EBV, donor-derived EBV-LCLs irradiated at 40Gy were used as stimulators. For response to adenovirus, donor-derived activated monocytes infected with Ad5f35 adenovirus were used.

[0425] Briefly, donor PBMCs were plated in X-Vivo 15 (Cambrex, Walkersville, Md.) in 24-well plates overnight, harvested the next morning, infected with Ad5f35 at a multiplicity of infection (MOI) of 200 for 2 hours, washed, irradiated at 30Gy, and used as stimulators. For anti-CMV response, a similar process using Ad5f35 adenovirus encoding the CMV pp65 transgene (Ad5f35-pp65) at an MOI of 5000 was used. Specific spot-forming units (SFU) were calculated by subtracting SFU from responder-alone and stimulator-alone wells from test wells. Response to CMV was the difference in SFU between Ad5f35-pp65 and Ad5f35 wells.

### EBV-Specific Cytotoxicity

[0426] Gene-modified allodepleted cells were stimulated with 40Gy-irradiated donor-derived EBVLCL at a responder: stimulator ratio of 40:1. After 9 days, the cultures were restimulated at a responder: stimulator ratio of 4:1. Restimulation was performed weekly as indicated. After two or three rounds of stimulation, cytotoxicity was measured in a 4-hour 51 Cr-release assay, using donor EBV-LCL as target cells and donor OKT3 blasts as autologous controls. NK activity was inhibited by adding 30-fold excess of cold K562 cells.

Induction of Apoptosis with Chemical Inducer of Dimerization, AP20187

[0427] Suicide gene functionality was assessed by adding a small molecule synthetic homodimerizer, AP20187 (Ariad Pharmaceuticals; Cambridge, Mass.), at 10 nM final concentration the day following CD19 immunomagnetic selection. Cells were stained with annexin V and 7-amino-actinomycin (7-AAD)(BD Pharmingen) at 24 hours and analyzed by flow cytometry. Cells negative for both annexin V and 7-AAD were considered viable, cells that were annexin V positive were apoptotic, and cells that were both annexin V and 7-AAD positive were necrotic. The percentage killing induced by dimerization was corrected for baseline viability as follows:

Percentage killing=100%−(% Viability in AP20187-treated cells÷% Viability in non-treated cells).

### Assessment of Transgene Expression Following Extended Culture and Reactivation

[0428] Cells were maintained in T cell medium containing 50U/ml IL-2 until 22 days after transduction. A portion of cells was reactivated on 24-well plates coated with 1 g/ml OKT3 and 1 μg/ml anti-CD28 (Clone CD28.2, BD Pharmingen, San Jose, Calif.) for 48 to 72 hours. CD19 expression and suicide gene function in both reactivated and non-reactivated cells were measured on day 24 or 25 post transduction.

[0429] In some experiments, cells also were cultured for 3 weeks post transduction and stimulated with 30G-irradiated allogeneic PBMC at a responder: stimulator ratio of 1:1. After 4 days of co-culture, a portion of cells was treated with 10 nM AP20187. Killing was measured by annexin V/7-AAD staining at 24 hours, and the effect of dimerizer on bystander virus-specific T cells was assessed by pentamer analysis on AP20187-treated and untreated cells.

### Regulatory T Cells

[0430] CD4, CD25 and Foxp3 expression was analyzed in gene-modified allodepleted cells using flow cytometry. For human Foxp3 staining, the eBioscience (San Diego, Calif.) staining set was used with an appropriate rat IgG2a isotype control. These cells were co-stained with surface CD25-FITC and CD4-PE. Functional analysis was performed by co-culturing CD4⁺25⁺ cells selected after allodepletion and gene modification with carboxyfluorescein diacetate N-succinimidyl ester (CFSE)-labeled autologous PBMC. CD4⁺25⁺ selection was performed by first depleting CD8⁺ cells using anti-CD 8 microbeads (Miltenyi Biotec, Auburn, Calif.), followed by positive selection using anti-CD25 microbeads (Miltenyi Biotec, Auburn, Calif.). CFSE-labeling was performed by incubating autologous PBMC at 2×10⁷/ml in phosphate buffered saline containing 1.5 μM CFSE for 10 minutes. The reaction was stopped by adding an equivalent volume of FBS and incubating for 10 minutes at 37° C. Cells were washed twice before use. CFSE-labeled PBMCs were stimulated with OKT3 500 ng/ml and 40G-irradiated allogeneic PBMC feeders at a PBMC:allogeneic feeder ratio of 5:1. The cells were then cultured with or without an equal number of autologous CD4⁺25⁺ gene-modified allodepleted cells. After 5 days of culture, cell division was analyzed by flow cytometry; CD19 was used to gate out non-CFSE-labeled CD4⁺CD25⁺ gene-modified T cells.

### Statistical Analysis

[0431] Paired, 2-tailed Student's t test was used to determine the statistical significance of differences between samples. All data are represented as mean±1 standard deviation.

### Results

[0432] Selectively allodepleted T cells can be efficiently transduced with iCasp9 and expanded

[0433] Selective allodepletion was performed in accordance with clinical protocol procedures. Briefly, 3/6 to 5/6 HLA-mismatched PBMC and lymphoblastoid cell lines (LCL) were co-cultured. RFT5-SMPT-dgA immunotoxin was applied after 72 hours of co-culture and reliably produced allodepleted cells with <10% residual proliferation (mean 4.5±2.8%; range 0.74 to 9.1%; 10 experiments) and containing <1% residual CD3⁺CD25⁺ cells (mean 0.23±0.20%; range 0.06 to 0.73%; 10 experiments), thereby fulfilling the release criteria for selective allodepletion, and serving as starting materials for subsequent manipulation.

[0434] Allodepleted cells activated on immobilized OKT3 for 48 hours could be efficiently transduced with Gal-V pseudotyped retrovirus vector encoding SFG.iCasp9.2A.CD19. Transduction efficiency assessed by FACS analysis for CD19 expression 2 to 4 days after transduction was about 53%±8%, with comparable results for small-scale (24-well plates) and large-scale (T75 flasks) transduction (about 55±8% versus about 50%±10% in 6 and 4 experiments, respectively). Cell numbers contracted in the first 2 days following OKT3 activation such that only about 61%±12% (range of about 45% to 80%) of allodepleted cells were recovered on the day of transduction. Thereafter, the cells showed significant expansion, with a mean expansion in the range of about 94±46-fold (range of about 40 to about 153) over the subsequent 8 days, resulting in a net 58±33-fold expansion. Cell expansion in both small- and large-scale experiments was similar, with net expansion of about 45±29 fold (range of about 25 to about 90) in 5 small-scale experiments and about 79±34 fold (range of about 50 to about 116) in 3 large-scale experiments.

### ΔCD19 Enables Efficient and Selective Enrichment of Transduced Cells on Immunomagnetic Columns

[0435] The efficiency of suicide gene activation sometimes depends on the functionality of the suicide gene itself, and sometimes on the selection system used to enrich for gene-modified cells. The use of CD19 as a selectable marker was investigated to determine if CD19 selection enabled the selection of gene-modified cells with sufficient purity and yield, and whether selection had any deleterious effects on subsequent cell growth. Small-scale selection was performed according to manufacturer's instruction; however, it was determined that large-scale selection was optimum when 10 l of CD19 microbeads was used per 1.3×10⁷ cells. FACS analysis was performed at 24 hours after immunomagnetic selection to minimize interference from anti-CD19 microbeads. The purity of the cells after immunomagnetic selection was consistently greater than 90%: mean percentage of CD19+ cells was in the range of about 98.3%±0.5% (n=5) in small-scale selections and in the range of about 97.4%±0.9% (n=3) in large-scale CliniMacs selections

[0436] The absolute yield of small- and large-scale selections were about 31%±11% and about 28%±6%, respectively; after correction for transduction efficiency. The mean recovery of transduced cells was about 54%±14% in small-scale and about 72%±18% in large-scale selections. The selection process did not have any discernable deleterious effect on subsequent cell expansion. In 4 experiments, the mean cell expansion over 3 days following CD19 immunomagnetic selection was about 3.5 fold for the CD19 positive fraction versus about 4.1 fold for non-selected transduced cells (p=0.34) and about 3.7 fold for non-transduced cells (p=0.75).

### Immunophenotype of Gene-Modified Allodepleted Cells

[0437] The final cell product (gene-modified allodepleted cells that had been cryopreserved 8 days after transduction) was immunophenotyped and was found to contain both CD4 and CD8 cells, with CD8 cells predominant, at 62%±11% CD8⁺ versus 23%±8% CD4⁺, as shown in the table below. NS=not significant, SD=standard deviation.

TABLE 1

| | Unmanipulated | Gene-modified | |
|---|---|---|---|
| | PBMC | allodepleted cells | |
| | (mean % ± SD) | (mean % ± SD) | |
| T cells: Total CD3⁺ | 82 ± 6 | 95 ± 6 | NS |
| CD3⁺ 4⁺ | 54 ± 5 | 23 ± 8 | p < 0.01 |
| CD3⁺⁸⁺ | 26 ± 9 | 62 ± 11 | p < 0.001 |
| NK cells: CD3⁻ 56⁺ | 6 ± 3 | 2 ± 1 | NS |
| Memory phenotype | | | |
| CD45RA⁺ | 66 ± 3 | 10 ± 5 | p < 0.001 |
| CD45RO⁺ | 26 ± 2 | 78 ± 7 | p < 0.001 |
| CD45RA⁻ CD62L⁺ | 19 ± 1 | 24 ± 7 | NS |
| CD45RA⁻ CD62L⁻ | 9 ± 1 | 64 ± 7 | p < 0.001 |
| CD27⁺ CD28⁺ | 67 ± 7 | 19 ± 9 | p < 0.001 |
| CD27⁺ CD28⁻ | 7 ± 3 | 9 ± 4 | NS |
| CD27⁻ CD28⁺ | 4 ± 1 | 19 ± 8 | p < 0.05 |
| CD27⁻ CD28⁻ | 22 ± 8 | 53 ± 18 | p < 0.05 |

[0438] The majorities of cells were CD45RO⁺ and had the surface immunophenotype of effector memory T cells. Expression of memory markers, including CD62L, CD27 and CD28, was heterogeneous. Approximately 24% of cells expressed CD62L, a lymph node-homing molecule predominantly expressed on central memory cells.

### Gene-Modified Allodepleted Cells Retained Antiviral Repertoire and Functionality

[0439] The ability of end-product cells to mediate antiviral immunity was assessed by interferon-ELISpot, cytotoxicity assay, and pentamer analysis. The cryopreserved gene-modified allodepleted cells were used in all analyses, since they were representative of the product currently being evaluated for use in a clinical study. Interferon-γ secretion in response to adenovirus, CMV or EBV antigens presented by donor cells was preserved although there was a trend towards reduced anti-EBV response in gene-modified allodepleted cells versus unmanipulated PBMC. The response to viral antigens was assessed by ELISpot in 4 pairs of unmanipulated PBMC and gene-modified allodepleted cells (GMAC). Adenovirus and CMV antigens were presented by donor-derived activated monocytes through infection with Ad5f35 null vector and Ad5f35-pp65 vector, respectively. EBV antigens were presented by donor EBV-LCL. The number of spot-forming units (SFU) was corrected for stimulator- and responder-alone wells. Only three of four donors were evaluable for CMV response, one seronegative donor was excluded.

[0440] Cytotoxicity was assessed using donor-derived EBV-LCL as targets. Gene-modified allodepleted cells that had undergone 2 or 3 rounds of stimulation with donor-derived EBV-LCL could efficiently lyse virus-infected autologous target cells Gene-modified allodepleted cells were stimulated with donor EBV-LCL for 2 or 3 cycles. ⁵¹Cr release assay was performed using donor-derived EBV-LCL and donor OKT3 blasts as targets. NK activity was blocked with 30-fold excess cold K562. The left panel shows results from 5 independent experiments using totally or partially mismatched donor-recipient pairs. The right panel shows results from 3 experiments using unrelated HLA haploidentical donor-recipient pairs. Error bars indicate standard deviation.

[0441] EBV-LCLs were used as antigen-presenting cells during selective allodepletion, therefore it was possible that EBV-specific T cells could be significantly depleted when the donor and recipient were haploidentical. To investigate this hypothesis, three experiments using unrelated HLA-haploidentical donor-recipient pairs were included, and the results showed that cytotoxicity against donor-derived EBV-LCL was retained. The results were corroborated by pentamer analysis for T cells recognizing HLA-B8-RAKFKQLL (SEQ ID NO: 287), an EBV lytic antigen (BZLF1) epitope, in two informative donors following allodepletion against HLA-B8 negative haploidentical recipients. Unmanipulated PBMC were used as comparators. The RAK-pentamer positive population was retained in gene-modified allodepleted cells and could be expanded following several rounds of in vitro stimulation with donor-derived EBV-LCL. Together, these results indicate that gene-modified allodepleted cells retained significant anti-viral functionality.

### Regulatory T Cells in the Gene-Modified Allodepleted Cell Population

[0442] Flow cytometry and functional analysis were used to determine whether regulatory T cells were retained in our allodepleted, gene modified, T cell product. A Foxp3⁺CD4⁺25⁺ population was found. Following immunomagnetic separation, the CD4⁺CD25⁺ enriched fraction demonstrated suppressor function when co-cultured with CFSE-labeled autologous PBMC in the presence of OKT3 and allogeneic feeders Donor-derived PBMC was labeled with CFSE and stimulated with OKT3 and allogeneic feeders. CD4⁺CD25⁺ cells were immunomagnetically selected from the gene-modified cell population and added at 1:1 ratio to test wells. Flow cytometry was performed after 5 days. Gene-modified T cells were gated out by CD19 expression. The addition of CD4⁺CD25⁺ gene-modified cells (bottom panel) significantly reduced cell proliferation. Thus, allodepleted T cells may reacquire regulatory phenotype even after exposure to a CD25 depleting immunotoxin.

Gene-Modified Allodepleted Cells were Efficiently and Rapidly Eliminated by Addition of Chemical Inducer of Dimerization

[0443] The day following immunomagnetic selection, 10 nM of the chemical inducer of dimerization, AP20187, was added to induce apoptosis, which appeared within 24 hours. FACS analysis with annexin V and 7-AAD staining at 24 hours showed that only about 5.5%±2.5% of AP20187-treated cells remained viable, whereas about 81.0%±9.0% of untreated cells were viable. Killing efficiency after correction for baseline viability was about 92.9%±3.8%. Large-scale CD19 selection produced cells that were killed with similar efficiency as small-scale selection: mean viability with and without AP20187, and percentage killing, in large and small scale were about 3.9%, about 84.0%, about 95.4% (n=3) and about 6.6%, about 79.3%, about 91.4% (n=5) respectively. AP20187 was non-toxic to non-transduced cells: viability with and without AP20187 was about 86%±9% and 87%±8% respectively (n=6).

Transgene Expression and Function Decreased with Extended Culture but were Restored Upon Cell Reactivation

[0444] To assess the stability of transgene expression and function, cells were maintained in T cell culture medium and low dose IL-2 (50U/ml) until 24 days after transduction. A portion of cells was then reactivated with OKT3/anti-CD28. CD19 expression was analyzed by flow cytometry 48 to 72 hours later, and suicide gene function was assessed by treatment with 10 nM AP20187. The obtained are for cells from day 5 post transduction (ie, 1 day after CD19 selection) and day 24 post transduction, with or without 48-72 hours of reactivation (5 experiments). In 2 experiments, CD25 selection was performed after OKT3/aCD28 activation to further enrich activated cells. Error bars represent standard deviation. * indicates p<0.05 when compared to cells from day 5 post transduction. By day 24, surface CD19 expression fell from about 98%±1% to about 88%±4% (p<0.05) with a parallel decrease in mean fluorescence intensity (MFI) from 793±128 to 478±107 (p<0.05) (see FIG. 13B). Similarly, there was a significant reduction in suicide gene function: residual viability was 19.6±5.6% following treatment with AP20187; after correction for baseline viability of 54.8±20.9%, this equated to killing efficiency of only 63.1±6.2%.

[0445] To determine whether the decrease in transgene expression with time was due to reduced transcription following T cell quiescence or to elimination of transduced cells, a portion of cells were reactivated on day 22 post transduction with OKT3 and anti-CD28 antibody. At 48 to 72 hours (day 24 or 25 post transduction), OKT3/aCD28-reactivated cells had significantly higher transgene expression than non-reactivated cells. CD19 expression increased from about 88%±4% to about 93%±4% (p<0.01) and CD19 MFI increased from 478±107 to 643±174 (p<0.01). Additionally, suicide gene function also increased significantly from about a 63.1%±6.2% killing efficiency to about a 84.6%±8.0% (p<0.01) killing efficiency. Furthermore, killing efficiency was completely restored if the cells were immunomagnetically sorted for the activation marker CD25: killing efficiency of CD25 positive cells was about 93%.2±1.2%, which was the same as killing efficiency on day 5 post transduction (93.1±3.5%). Killing of the CD25 negative fraction was 78.6±9.1%.

[0446] An observation of note was that many virus-specific T cells were spared when dimerizer was used to deplete gene-modified cells that have been re-activated with allogeneic PBMC, rather than by non-specific mitogenic stimuli. After 4 days reactivation with allogeneic cells, as shown in FIGS. 14A and 14B, treatment with AP20187 spares (and thereby enriches) viral reactive subpopulations, as measured by the proportion of T cells reactive with HLA pentamers specific for peptides derived from EBV and CMV. Gene-modified allodepleted cells were maintained in culture for 3 weeks post-transduction to allow transgene down-modulation. Cells were stimulated with allogeneic PBMC for 4 days, following which a portion was treated with 10 nM AP20187. The frequency of EBV-specific T cells and CMV-specific T cells were quantified by pentamer analysis before allostimulation, after allostimulation, and after treatment of allostimulated cells with dimerizer. The percentage of virus-specific T cells decreased after allostimulation. Following treatment with dimerizer, virus-specific T cells were partially and preferentially retained.

### Discussion

[0447] The feasibility of engineering allogeneic T cells with two distinct safety mechanisms, selective allodepletion and suicide gene-modification has been demonstrated herein. In combination, these modifications can enhance and/or enable addback of substantial numbers of T cells with anti-viral and anti-tumor activity, even after haploidentical transplantation. The data presented herein show that the suicide gene, iCasp9, functions efficiently (>90% apoptosis after treatment with dimerizer) and that down-modulation of transgene expression that occurred with time was rapidly reversed upon T cell activation, as would occur when alloreactive T cells encountered their targets. Data presented herein also show that CD19 is a suitable selectable marker that enabled efficient and selective enrichment of transduced cells to >90% purity. Furthermore, the data presented herein indicate that these manipulations had no discernable effects on the immunological competence of the engineered T cells with retention of antiviral activity, and regeneration of a CD4⁺CD25⁺ Foxp3⁺ population with Treg activity.

[0448] Given that the overall functionality of suicide genes depends on both the suicide gene itself and the marker used to select the transduced cells, translation into clinical use requires optimization of both components, and of the method used to couple expression of the two genes. The two most widely used selectable markers, currently in clinical practice, each have drawbacks. Neomycin phosphotransferase (neo) encodes a potentially immunogenic foreign protein and requires a 7-day culture in selection medium, which not only increases the complexity of the system, but is also potentially damaging to virus-specific T cells. A widely used surface selection marker, LNGFR, has recently had concerns raised, regarding its oncogenic potential and potential correlation with leukemia, in a mouse model, despite its apparent clinical safety. Furthermore, LNGFR selection is not widely available, because it is used almost exclusively in gene therapy. A number of alternative selectable markers have been suggested. CD34 has been well-studied in vitro, but the steps required to optimize a system configured primarily for selection of rare hematopoietic progenitors, and more critically, the potential for altered in vivo T cell homing, make CD34 sub-optimal for use as a selectable marker for a suicide switch expression construct. CD19 was chosen as an alternative selectable marker, since clinical grade CD19 selection is readily available as a method for B-cell depletion of stem cell autografts. The results presented herein demonstrated that CD19 enrichment could be performed with high purity and yield and, furthermore, the selection process had no discernable effect on subsequent cell growth and functionality.

[0449] The effectiveness of suicide gene activation in CD19-selected iCasp9 cells compared very favorably to that of neo- or LNGFR-selected cells transduced to express the HSVtk gene. The earlier generations of HSVtk constructs provided 80-90% suppression of ³H-thymidine uptake and showed similar reduction in killing efficiency upon extended in vitro culture, but were nonetheless clinically efficacious. Complete resolution of both acute and chronic GVHD has been reported with as little as 80% in vivo reduction in circulating gene-modified cells. These data support the hypothesis that transgene down-modulation seen in vitro is unlikely to be an issue because activated T cells responsible for GVHD will upregulate suicide gene expression and will therefore be selectively eliminated in vivo. Whether this effect is sufficient to allow retention of virus- and leukemia-specific T cells in vivo will be tested in a clinical setting. By combining in vitro selective allodepletion prior to suicide gene modification, the need to activate the suicide gene mechanism may be significantly reduced, thereby maximizing the benefits of addback T cell based therapies.

[0450] The high efficiency of iCasp9-mediated suicide seen in vitro has been replicated in vivo. In a SCID mouse-human xenograft model, more than 99% of iCasp9-modified T cells were eliminated after a single dose of dimerizer. AP1903, which has extremely close functional and chemical equivalence to AP20187, and currently is proposed for use in a clinical application, has been safety tested on healthy human volunteers and shown to be safe. Maximal plasma level of between about 10 ng/ml to about 1275 ng/ml AP1903 (equivalent to between about 7 nM to about 892 nM) was attained over a 0.01 mg/kg to 1.0 mg/kg dose range administered as a 2-hour intravenous infusion. There were substantially no significant adverse effects. After allowing for rapid plasma redistribution, the concentration of dimerizer used in vitro remains readily achievable in vivo.

[0451] Optimal culture conditions for maintaining the immunological competence of suicide gene-modified T cells must be determined and defined for each combination of safety switch, selectable marker and cell type, since phenotype, repertoire and functionality can all be affected by the stimulation used for polyclonal T cell activation, the method for selection of transduced cells, and duration of culture. The addition of CD28 co-stimulation and the use of cell-sized paramagnetic beads to generate gene modified-cells that more closely resemble unmanipulated PBMC in terms of CD4:CD8 ratio, and expression of memory subset markers including lymph node homing molecules CD62L and CCR7, may improve the in vivo functionality of gene-modified T cells. CD28 co-stimulation also may increase the efficiency of retroviral transduction and expansion. Interestingly however, the addition of CD28 co-stimulation was found to have no impact on transduction of allodepleted cells, and the degree of cell expansion demonstrated was higher when compared to the anti-CD3 alone arm in other studies. Furthermore, iCasp9-modified allodepleted cells retained significant anti-viral functionality, and approximately one fourth retained CD62L expression. Regeneration of CD4⁺CD25⁺ Foxp3⁺ regulatory T cells was also seen. The allodepleted cells used as the starting material for T cell activation and transduction may have been less sensitive to the addition of anti-CD28 antibody as co-stimulation. CD25-depleted PBMC/EBV-LCL co-cultures contained T cells and B cells that already express CD86 at significantly higher level than unmanipulated PBMCs and may they provide co-stimulation. Depletion of CD25⁺ regulatory T cells prior to polyclonal T cell activation with anti-CD3 has been reported to enhance the immunological competence of the final T cell product. In order to minimize the effect of in vitro culture and expansion on functional competence, a relatively brief culture period was used in some experiments presented herein, whereby cells were expanded for a total of 8 days post-transduction with CD19-selection being performed on day 4.

[0452] Finally, scaled up production was demonstrated such that sufficient cell product can be produced to treat adult patients at doses of up to 10⁷ cells/kg: allodepleted cells can be activated and transduced at 4×10⁷ cells per flask, and a minimum of 8-fold return of CD19-selected final cell product can be obtained on day 8 post-transduction, to produce at least 3×10⁸ allodepleted gene-modified cells per original flask. The increased culture volume is readily accommodated in additional flasks or bags.

[0453] The allodepletion and iCasp9-modification presented herein may significantly improve the safety of adding back T cells, particularly after haploidentical stem cell allografts. This should in turn enable greater dose-escalation, with a higher chance of producing an anti-leukemia effect.

### Example 3

### CASPALLO—Phase 1 Clinical Trial of Allodepleted T Cells Transduced with Inducible Caspase-9 Suicide Gene after Haploidentical Stem Cell Transplantation

[0454] This example presents results of a phase 1 clinical trial using the alternative suicide gene strategy illustrated in FIG. 2. Briefly, donor peripheral blood mononuclear cells were co-cultured with recipient irradiated EBV-transformed lymphoblastoid cells (40:1) for 72 hrs, allodepleted with a CD25 immunotoxin and then transduced with a retroviral supernatant carrying the iCasp9 suicide gene and a selection marker (ΔCD19); ΔCD19 allowed enrichment to >90% purity via immunomagnetic selection.

[0455] An example of a protocol for generation of a cell therapy product is provided herein.

### Source Material

[0456] Up to 240 ml (in 2 collections) of peripheral blood was obtained from the transplant donor according to established protocols. In some cases, dependent on the size of donor and recipient, a leukopheresis was performed to isolate sufficient T cells. 10 cc-30 cc of blood also was drawn from the recipient and was used to generate the Epstein Barr virus (EBV)-transformed lymphoblastoid cell line used as stimulator cells. In some cases, dependent on the medical history and/or indication of a low B cell count, the LCLs were generated using appropriate 1st degree relative (e.g., parent, sibling, or offspring) peripheral blood mononuclear cells.

### Generation of Allodepleted Cells

[0457] Allodepleted cells were generated from the transplant donors as presented herein. Peripheral blood mononuclear cells (PBMCs) from healthy donors were co-cultured with irradiated recipient Epstein Barr virus (EBV)-transformed lymphoblastoid cell lines (LCL) at responder-to-stimulator ratio of 40:1 in serum-free medium (AIM V; Invitrogen, Carlsbad, Calif.). After 72 hours, activated T cells that express CD25 were depleted from the co-culture by overnight incubation in RFT5-SMPT-dgA immunotoxin. Allodepletion is considered adequate if the residual CD3⁺CD25⁺ population was <1% and residual proliferation by ³H-thymidine incorporation was <10%.

### Retroviral Production

[0458] A retroviral producer line clone was generated for the iCasp9-CD19 construct. A master cell-bank of the producer also was generated. Testing of the master-cell bank was performed to exclude generation of replication competent retrovirus and infection by Mycoplasma, HIV, HBV, HCV and the like. The producer line was grown to confluency, supernatant harvested, filtered, aliquoted and rapidly frozen and stored at −80° C. Additional testing was performed on all batches of retroviral supernatant to exclude Replication Competent Retrovirus (RCR) and issued with a certificate of analysis, as per protocol.

### Transduction of Allodepleted Cells

[0459] Allodepleted T-lymphocytes were transduced using Fibronectin. Plates or bags were coated with recombinant Fibronectin fragment CH-296 (Retronectin™, Takara Shuzo, Otsu, Japan). Virus was attached to retronectin by incubating producer supernatant in coated plates or bags. Cells were then transferred to virus coated plates or bags. After transduction allodepleted T cells were expanded, feeding them with IL-2 twice a week to reach the sufficient number of cells as per protocol.

### CD19 Immunomagnetic Selection

[0460] Immunomagnetic selection for CD19 was performed 4 days after transduction. Cells are labeled with paramagnetic microbeads conjugated to monoclonal mouse anti-human CD19 antibodies (Miltenyi Biotech, Auburn, Calif.) and selected on a CliniMacs Plus automated selection device. Depending upon the number of cells required for clinical infusion cells were either cryopreserved after the CliniMacs selection or further expanded with IL-2 and cryopreserved on day 6 or day 8 post transduction.

### Freezing

[0461] Aliquots of cells were removed for testing of transduction efficiency, identity, phenotype and microbiological culture as required for final release testing by the FDA. The cells were cryopreserved prior to administration according to protocol.

### Study Drugs

### RFT5-SMPT-dgA

[0462] RFT5-SMPT-dgA is a murine IgG1 anti-CD25 (IL-2 receptor alpha chain) conjugated via a hetero-bifunctional crosslinker [N-succinimidyloxycarbonyl-alpha-methyl-d-(2-pyridylthio) toluene] (SMPT) to chemically deglycosylated ricin A chain (dgA). RFT5-SMPT-dgA is formulated as a sterile solution at 0.5 mg/ml.

### Synthetic Homodimerizer, AP1903

[0463] Mechanism of Action: AP1903-inducible cell death is achieved by expressing a chimeric protein comprising the intracellular portion of the human (Caspase-9 protein) receptor, which signals apoptotic cell death, fused to a drug-binding domain derived from human FK506-binding protein (FKBP). This chimeric protein remains quiescent inside cells until administration of AP1903, which cross-links the FKBP domains, initiating Caspase signaling and apoptosis.

[0464] Toxicology: AP1903 has been evaluated as an Investigational New Drug (IND) by the FDA and has successfully completed a phase 1 clinical safety study. No significant adverse effects were noted when API 903 was administered over a 0.01 mg/kg to 1.0 mg/kg dose range.

[0465] Pharmacology/Pharmacokinetics: Patients received 0.4 mg/kg of AP1903 as a 2 h infusion-based on published Pk data which show plasma concentrations of 10 ng/mL-I275 ng/mL over the 0.01 mg/kg to 1.0 mg/kg dose range with plasma levels falling to 18% and 7% of maximum at 0.5 and 2 hrs post dose.

[0466] Side Effect Profile in Humans: No serious adverse events occurred during the Phase 1 study in volunteers. The incidence of adverse events was very low following each treatment, with all adverse events being mild in severity. Only one adverse event was considered possibly related to AP1903. This was an episode of vasodilatation, presented as “facial flushing” for 1 volunteer at the 1.0 mg/kg AP1903 dosage. This event occurred at 3 minutes after the start of infusion and resolved after 32 minutes duration. All other adverse events reported during the study were considered by the investigator to be unrelated or to have improbable relationship to the study drug. These events included chest pain, flu syndrome, halitosis, headache, injection site pain, vasodilatation, increased cough, rhinitis, rash, gum hemorrhage, and ecchymosis.

[0467] Patients developing grade 1 GVHD were treated with 0.4 mg/kg AP1903 as a 2-hour infusion. Protocols for administration of AP1903 to patients grade 1 GVHD were established as follows. Patients developing GvHD after infusion of allodepleted T cells are biopsied to confirm the diagnosis and receive 0.4 mg/kg of AP1903 as a 2 h infusion. Patients with Grade I GVHD received no other therapy initially, however if they showed progression of GvHD conventional GvHD therapy was administered as per institutional guidelines. Patients developing grades 2-4 GVHD were administered standard systemic immunosuppressive therapy per institutional guidelines, in addition to the AP1903 dimerizer drug.

[0468] Instructions for preparation and infusion: AP1903 for injection is obtained as a concentrated solution of 2.33 ml in a 3-ml vial, at a concentration of 5 mg/ml, (i.e., 11.66 mg per vial). AP1903 may also be provided, for example, at 8 ml per vial, at 5 mg/ml. Prior to administration, the calculated dose was diluted to 100 mL in 0.9% normal saline for infusion. AP1903 for injection (0.4 mg/kg) in a volume of 100 ml was administered via IV infusion over 2 hours, using a non-DEHP, non-ethylene oxide sterilized infusion set and infusion pump.

[0469] The iCasp9 suicide gene expression construct (e.g., SFG.iCasp9.2A.ΔCD19), shown in FIG. 24 consists of inducible Caspase-9 (iCasp9) linked, via a cleavable 2A-like sequence, to truncated human CD19 (ΔCD19). iCasp9 includes a human FK506-binding protein (FKBP12; GenBank AH002 818) with an F36V mutation, connected via a Ser-Gly-Gly-Gly-Ser-Gly linker (SEQ ID NO: 289) to human Caspase-9 (CASP9; GenBank NM 001229). The F36V mutation may increase the binding affinity of FKBP12 to the synthetic homodimerizer, AP20187 or AP1903. The Caspase recruitment domain (CARD) has been deleted from the human Caspase-9 sequence and its physiological function has been replaced by FKBP12. The replacement of CARD with FKBP12 increases transgene expression and function. The 2A-like sequence encodes an 18 amino acid peptide from Thosea Asigna insect virus, which mediates >99% cleavage between a glycine and terminal proline residue, resulting in 17 extra amino acids in the C terminus of iCasp9, and one extra proline residue in the N terminus of CD19. ΔCD19 consists of full length CD19 (GenBank NM 001770) truncated at amino acid 333 (TDPTRRF (SEQ ID NO: 290)), which shortens the intracytoplasmic domain from 242 to 19 amino acids, and removes all conserved tyrosine residues that are potential sites for phosphorylation.

### In Vivo Studies

[0470] Three patients received iCasp9+ T cells after haplo-CD34⁺ stem cell transplantation (SCT), at dose levels between about 1×10⁶ to about 3×10⁶ cells/kg.

TABLE 2
Characteristics of the patients and clinical outcome.

| | | | | Days from | Number of | | |
|---|---|---|---|---|---|---|---|
| | | | Disease | SCT to T- | cells | | |
| | Sex | | status at | cell | infused | Acute | Clinical |
| Patient # | (age (yr)) | Diagnosis | SCT | infusion | per kg | GvHD | outcome |
| P1 | M(3) | MDS/AML | CR2 | 63 | 1 × 10⁶ | Grade1/2 | Alive in |
| | | | | | | (skin, liver) | CR >12 |
| | | | | | | | months |
| | | | | | | | No GvHD |
| P2 | F(17) | B-ALL | CR2 | 80 and 112 | (1 × 10⁶)2 | Grade 1 | Alive in |
| | | | | | | (skin) | CR >12 |
| | | | | | | | months |
| | | | | | | | No GvHD |
| P3 | M(8) | T-ALL | PIF/CR1 | 93 | 3 × 10⁶ | None | Alive in |
| | | | | | | | CR >12 |
| | | | | | | | No GvHD |
| P4 | F(4) | T-ALL | Active | 30 | 3 × 10⁶ | Grade 1 | Alive in |
| | | | disease | | | (skin) | CR >12 |
| | | | | | | | No GvHD |

[0471] Infused T cells were detected in vivo by flow cytometry (CD3+ΔCD19+) or qPCR as early as day 7 after infusion, with a maximum fold expansion of 170±5 (day 29±9 after infusion), as illustrated in FIGS. 27, 28, and 29. Two patients developed grade I/II aGVHD (see FIGS. 31-32) and AP1903 administration caused >90% ablation of CD3+ΔCD19+ cells, within 30 minutes of infusion (see FIGS. 30, 33, and 34), with a further log reduction within 24 hours, and resolution of skin and liver aGvHD within 24 hrs, showing that iCasp9 transgene was functional in vivo. For patient two, the disappearance of skin rash within 24 hours post treatment was observed.

TABLE 3
Patients with GvHD (dose level 1)

| | SCT to | T cells to | GvHD |
|---|---|---|---|
| Patient | GvHD (days) | GvHD (days) | (grade/site) |
| 1 | 77 | 14 | 2 (liver, skin) |
| 2 | 124 | 45/13 | 2 (skin) |

[0472] Ex vivo experiments confirmed this data. Furthermore, the residual allodepleted T cells were able to expand and were reactive to viruses (CMV) and fungi (Aspergillus fumigatus) (IFN-γ production). These in vivo studies found that a single dose of dimerizer drug can reduce or eliminate the subpopulation of T cells causing GvHD, but can spare virus specific CTLs, which can then re-expand.

### Immune Reconstitution

[0473] Depending on availability of patient cells and reagents, immune reconstitution studies (Immunophenotyping, T and B cell function) may be obtained at serial intervals after transplant. Several parameters measuring immune reconstitution resulting from iCaspase transduced allodepleted T cells will be analyzed. The analysis includes repeated measurements of total lymphocyte counts, T and CD19 B cell numbers, and FACS analysis of T cell subsets (CD3, CD4, CD8, CD16, CD19, CD27, CD28, CD44, CD62L, CCR7, CD56, CD45RA, CD45RO, alpha/beta and gamma/delta T cell receptors). Depending on the availability of a patients T cells T regulatory cell markers such as CD41 CD251 FoxP3 also are analyzed. Approximately 10-60 ml of patient blood is taken, when possible, 4 hours after infusion, weekly for 1 month, monthly ×9 months, and then at 1 and 2 years. The amount of blood taken is dependent on the size of the recipient and does not exceed 1-2 cc/kg in total (allowing for blood taken for clinical care and study evaluation) at any one blood draw.

### Persistence and Safety of Transduced Allodepleted T Cells

[0474] The following analysis was also performed on the peripheral blood samples to monitor function, persistence and safety of transduced T-cells at time-points indicated in the study calendar:
[0475] Phenotype by flow cytometry to detect the presence of transgenic cells.
[0476] RCR testing by PCR.
[0477] Quantitative real-time PCR for detecting retroviral integrants.
[0478] RCR testing by PCR is performed pre study, at 3, 6, and 12 months, and then yearly for a total of 15 years. Tissue, cell, and serum samples are archived for use in future studies for RCR as required by the FDA.

### Statistical Analysis and Stopping Rules.

[0479] The MTD is defined to be the dose which causes grade III/IV acute GVHD in at most 25% of eligible cases. The determination is based on a modified continual reassessment method (CRM) using a logistic model with a cohort of size 2. Three dose groups are being evaluated namely, 1×10⁶, 3×10⁶, 1×10⁷ with prior probabilities of toxicity estimated at 10%, 15%, and 30%, respectively. The proposed CRM design employs modifications to the original CRM by accruing more than one subject in each cohort, limiting dose escalation to no more than one dose level, and starting patient enrollment at the lowest dose level shown to be safe for non-transduced cells. Toxicity outcome in the lowest dose cohort is used to update the dose-toxicity curve. The next patient cohort is assigned to the dose level with an associated probability of toxicity closest to the target probability of 25%. This process continues until at least 10 patients have been accrued into this dose-escalation study. Depending on patient availability, at most 18 patients may be enrolled into the Phase 1 trial or until 6 patients have been treated at the current MTD. The final MTD will be the dose with probability closest to the target toxicity rate at these termination points.

[0480] Simulations were performed to determine the operating characteristics of the proposed design and compared this with a standard 3+3 dose-escalation design. The proposed design delivers better estimates of the MTD based on a higher probability of declaring the appropriate dose level as the MTD, afforded smaller number of patients accrued at lower and likely ineffective dose levels, and maintained a lower average total number of patients required for the trial. A shallow dose-toxicity curve is expected over the range of doses proposed herein and therefore accelerated dose-escalations can be conducted without comprising patient safety. The simulations performed indicate that the modified CRM design does not incur a larger average number of total toxicities when compared to the standard design (total toxicities equal to 1.9 and 2.1, respectively.

[0481] Grade III/IV GVHD that occurs within 45 days after initial infusion of allodepleted T cells will be factored into the CRM calculations to determine the recommended dose for the subsequent cohort. Real-time monitoring of patient toxicity outcome is performed during the study in order to implement estimation of the dose-toxicity curve and determine dose level for the next patient cohort using one of the pre-specified dose levels.

[0482] Treatment limiting toxicities will include:
[0483] grade 4 reactions related to infusion,
[0484] graft failure (defined as a subsequent decline in the ANC to <500/mm³ for three consecutive measurements on different days, unresponsive to growth factor therapy that persists for at least 14 days. occurring within 30 days after infusion of TC-T
[0485] grade 4 nonhematologic and noninfectious adverse events, occurring within 30 days after infusion
[0486] grades 3-4 acute GVHD by 45 days after infusion of TC-T
[0487] treatment-related death occurring within 30 days after infusion

[0488] GVHD rates are summarized using descriptive statistics along with other measures of safety and toxicity. Likewise, descriptive statistics will be calculated to summarize the clinical and biologic response in patients who receive AP1903 due to great than Grade 1 GVHD.

[0489] Several parameters measuring immune reconstitution resulting from iCaspase transduced allodepleted T cells will be analyzed. These include repeated measurements of total lymphocyte counts, T and CD19 B cell numbers, and FACS analysis of T cell subsets (CD3, CD4, CDS, CD16, CD19, CD27, CD44, CD62L, CCR7, CD56, CD45RA, CD45RO, alpha/beta and gamma/delta T cell receptors). If sufficient T cells remain for analysis, T regulatory cell markers such as CD4/CD25/FoxP3 will also be analyzed. Each subject will be measured pre-infusion and at multiple time points post-infusion as presented above.

[0490] Descriptive summaries of these parameters in the overall patient group and by dose group as well as by time of measurement will be presented. Growth curves representing measurements over time within a patient will be generated to visualize general patterns of immune reconstitution. The proportion of iCasp9 positive cells will also be summarized at each time point. Pairwise comparisons of changes in these endpoints over time compared to pre-infusion will be implemented using paired t-tests or Wilcoxon signed-ranks test.

[0491] Longitudinal analysis of each repeatedly-measured immune reconstitution parameter using the random coefficients model will be performed. Longitudinal analysis allows construction of model patterns of immune reconstitution per patient while allowing for varying intercepts and slopes within a patient. Dose level as an independent variable in the model to account for the different dose levels received by the patients will also be used. Testing whether there is a significant improvement in immune function over time and estimates of the magnitude of these improvements based on estimates of slopes and its standard error will be possible using the model presented herein. Evaluation of any indication of differences in rates of immune reconstitution across different dose levels of CTLs will also be performed. The normal distribution with an identity link will be utilized in these models and implemented using SAS MIXED procedure. The normality assumption of the immune reconstitution parameters will be assessed and transformations (e.g. log, square root) can be performed, if necessary to achieve normality.

[0492] A strategy similar to the one presented above can be employed to assess kinetics of T cell survival, expansion and persistence. The ratio of the absolute T cell numbers with the number of marker gene positive cells will be determined and modeled longitudinally over time. A positive estimate of the slope will indicate increasing contribution of T cells for immune recovery. Virus-specific immunity of the iCasp9 T cells will be evaluated by analysis of the number of T cells releasing IFN gamma based on ex-vivo stimulation virus-specific CTLs using longitudinal models. Separate models will be generated for analysis of EBV, CMV and adenovirus evaluations of immunity.

[0493] Finally, overall and disease-free survival in the entire patient cohort will be summarized using the Kaplan-Meier product-limit method. The proportion of patients surviving and who are disease-free at 100 days and 1 year post transplant can be estimated from the Kaplan-Meier curves.

[0494] In conclusion, addback of iCasp9+ allodepleted T cells after haplo CD34⁺ SCT allows a significant expansion of functional donor lymphocytes in vivo and a rapid clearance of alloreactive T cells with resolution of aGvHD.

### Example 4

### In Vivo T Cell Allodepletion

[0495] The protocols provided in Examples 1-3 may also be modified to provide for in vivo T cell allodepletion. To extend the approach to a larger group of subjects who might benefit from immune reconstitution without acute GvHD, the protocol may be simplified, by providing for an in vivo method of T cell depletion. In the pre-treatment allodepletion method, as discussed herein, EBV-transformed lymphoblastoid cell lines are first prepared from the recipient, which then act as alloantigen presenting cells. This procedure can take up to 8 weeks, and may fail in extensively pre-treated subjects with malignancy, particularly if they have received rituximab as a component of their initial therapy. Subsequently, the donor T cells are co-cultured with recipient EBV-LCL, and the alloreactive T cells (which express the activation antigen CD25) are then treated with CD25-ricin conjugated monoclonal antibody. This procedure may take many additional days of laboratory work for each subject.

[0496] The process may be simplified by using an in vivo method of allodepletion, building on the observed rapid in vivo depletion of alloreactive T cells by dimerizer drug and the sparing of unstimulated but virus/fungus reactive T cells.

[0497] If there is development of Grade I or greater acute GvHD, a single dose of dimerizer drug is administered, for example at a dose of 0.4 mg/kg of AP1903 as a 2 hour intravenous infusion. Up to 3 additional doses of dimerizer drug may be administered at 48 hour intervals if acute GvHD persists. In subjects with Grade II or greater acute GvHD, these additional doses of dimerizer drug may be combined with steroids. For patients with persistent GVHD who cannot receive additional doses of the dimerizer due to a Grade III or IV reaction to the dimerizer, the patient may be treated with steroids alone, after either 0 or 1 doses of the dimerizer.

Generation of Therapeutic T cells

[0498] Up to 240 ml (in 2 collections) of peripheral blood is obtained from the transplant donor according to the procurement consent. If necessary, a leukapheresis is used to obtain sufficient T cells; (either prior to stem cell mobilization or seven days after the last dose of G-CSF). An extra 10-30 mis of blood may also be collected to test for infectious diseases such as hepatitis and HIV.

[0499] Peripheral blood mononuclear cells are be activated using anti-human CD3 antibody (e.g. from Orthotech or Miltenyi) on day 0 and expanded in the presence of recombinant human interleukin-2 (rhIL-2) on day 2. CD3 antibody-activated T cells are transduced by the iCaspase-9 retroviral vector on flasks or plates coated with recombinant Fibronectin fragment CH-296 (Retronectin™, Takara Shuzo, Otsu, Japan). Virus is attached to retronectin by incubating producer supernatant in retronectin coated plates or flasks. Cells are then transferred to virus coated tissue culture devices. After transduction T cells are expanded by feeding them with rhIL-2 twice a week to reach the sufficient number of cells as per protocol.

[0500] To ensure that the majority of infused T cells carry the suicide gene, a selectable marker, truncated human CD19 (ΔCD19) and a commercial selection device, may be used to select the transduced cells to >90% purity. Immunomagnetic selection for CD19 may be performed 4 days after transduction. Cells are labeled with paramagnetic microbeads conjugated to monoclonal mouse anti-human CD19 antibodies (Miltenyi Biotech, Auburn, Calif.) and selected on a CliniMacs Plus automated selection device. Depending upon the number of cells required for clinical infusion cells might either be cryopreserved after the CliniMacs selection or further expanded with IL-2 and cryopreserved as soon as sufficient cells have expanded (up to day 14 from product initiation).

[0501] Aliquots of cells may be removed for testing of transduction efficiency, identity, phenotype, autonomous growth and microbiological examination as required for final release testing by the FDA. The cells are be cryopreserved prior to administration.

### Administration of T Cells

[0502] The transduced T cells are administered to patients from, for example, between 30 and 120 days following stem cell transplantation. The cryopreserved T cells are thawed and infused through a catheter line with normal saline. For children, premedications are dosed by weight. Doses of cells may range from, for example, from about 1×10⁴ cells/kg to 1×10⁸ cells/kg, for example from about 1×10⁵ cells/kg to 1×10⁷ cells/kg, from about 1×10⁶ cells/kg to 5×10⁶ cells/kg, from about 1×10⁴ cells/kg to 5×10⁶ cells/kg, for example, about 1×10⁴, about 1×10⁵, about 2×10⁵, about 3×10⁵, about 5×10⁵, 6×10⁵, about 7×10⁵, about 8×10⁵, about 9×10⁵, about 1×10⁶, about 2×10⁶, about 3×10⁶, about 4×10⁶, or about 5×10⁶ cells/kg.

### Treatment of GvHD

[0503] Patients who develop grade acute GVHD are treated with 0.4 mg/kg AP1903 as a 2-hour infusion. AP1903 for injection may be provided, for example, as a concentrated solution of 2.33 ml in a 3 ml vial, at a concentration of 5 mg/ml, (i.e 11.66 mg per vial). AP1903 may also provided in different sized vials, for example, 8 ml at 5 mg/ml may be provided. Prior to administration, the calculated dose will be diluted to 100 mL in 0.9% normal saline for infusion. AP1903 for Injection (0.4 mg/kg) in a volume of 100 ml may be administered via IV infusion over 2 hours, using a non-DEHP, non-ethylene oxide sterilized infusion set and an infusion pump.

TABLE 4
Sample treatment schedule

| Time | Donor | Recipient |
|---|---|---|
| Pre- | Obtain up to 240 ml of blood | |
| transplant | or unstimulated leukapheresis | |
| | from bone marrow transplant | |
| | donor. Prepare T cells and | |
| | donor LCLs for later immune | |
| | reconstitution studies. | |
| Day 0 | Anti-CD3 activation of PBMC | |
| Day 2 | IL-2 feed | |
| Day 3 | Transduction | |
| Day 4 | Expansion | |
| Day 6 | CD19 selection. | |
| | Cryopreservation (*if required | |
| | dose is met) | |
| Day 8 | Assess transduction efficiency | |
| | and iCaspase9 transgene | |
| | functionality by phenotype. | |
| | Cryopreservation (*if not yet | |
| | performed) | |
| Day 10 or Day | Cryopreservation (if not yet | |
| 12 to Day 14 | performed) | |
| From 30 to 120 | | Thaw and infuse T cells |
| days post | | 30 to 120 days post |
| transplant | | stem cell infusion. |

[0504] Other methods may be followed for clinical therapy and assessment as provided in, for example, Examples 1-3 herein.

### Example 5

### Using the iCasp9 Suicide Gene to Improve the Safety of Mesenchymal Stromal Cell Therapies

[0505] Mesenchymal stromal cells (MSCs) have been infused into hundreds of patients to date with minimal reported deleterious side effects. The long term side effects are not known due to limited follow-up and a relatively short time since MSCs have been used in treatment of disease. Several animal models have indicated that there exists the potential for side effects, and therefore a system allowing control over the growth and survival of MSCs used therapeutically is desirable. The inducible Caspase-9 suicide switch expression vector construct presented herein was investigated as a method of eliminating MSC's in vivo and in vitro.

### Materials and Methods

### MSC Isolation

[0506] MSCs were isolated from healthy donors. Briefly, post-infusion discarded healthy donor bone marrow collection bags and filters were washed with RPMI 1640 (HyClone, Logan, Utah) and plated on tissue culture flasks in DMEM (Invitrogen, Carlsbad, Calif.) with 10% fetal bovine serum (FBS), 2 mM alanyl-glutamine (Glutamax, Invitrogen), 100 units/mL penicillin and 100 μg/mL streptomycin (Invitrogen). After 48 hours, the supernatant was discarded and the cells were cultured in complete culture medium (CCM): α-MEM (Invitrogen) with 16.5% FBS, 2 mM alanyl-glutamine, 100 units/mL penicillin and 100 μg/mL streptomycin. Cells were grown to less then 80% confluence and replated at lower densities as appropriate.

### Immunophenotyping

[0507] Phycoerythrin (PE), fluorescein isothiocyanate (FITC), peridinin chlorophyll protein (PerCP) or allophycocyanin (APC)-conjugated CD14, CD34, CD45, CD73, CD90, CD105 and CD133 monoclonal antibodies were used to stain MSCs. All antibodies were from Becton Dickinson-Pharmingen (San Diego, Calif.), except where indicated. Control samples labeled with an appropriate isotype-matched antibody were included in each experiment. Cells were analyzed by fluorescence-activated cell sorting FACScan (Becton Dickinson) equipped with a filter set for 4 fluorescence signals.

### Differentiation Studies In Vitro

[0508] Adipocytic differentiation. MSCs (7.5×10⁴ cells) were plated in wells of 6-well plates in NH AdipoDiff Medium (Miltenyi Biotech, Auburn, Calif.). Medium was changed every third day for 21 days. Cells were stained with Oil Red 0 solution (obtained by diluting 0.5% w/v Oil Red 0 in isopropanol with water at a 3:2 ratio), after fixation with 4% formaldehyde in phosphate buffered saline (PBS).

[0509] Osteogenic differentiation. MSCs (4.5×10⁴ cells) were plated in 6-well plates in NH OsteoDiff Medium (Miltenyi Biotech). Medium was changed every third day for 10 days. Cells were stained for alkaline phosphatase activity using Sigma Fast BCIP/NBT substrate (Sigma-Aldrich, St. Louis, Mo.) as per manufacturer instructions, after fixation with cold methanol.

[0510] Chondroblastic differentiation. MSC pellets containing 2.5×10⁵ to 5×10⁵ cells were obtained by centrifugation in 15 mL or 1.5 mL polypropylene conical tubes and cultured in NH ChondroDiff Medium (Miltenyi Biotech). Medium was changed every third day for a total of 24 days. Cell pellets were fixed in 4% formalin in PBS and processed for routine paraffin sectioning. Sections were stained with alcian blue or using indirect immunofluorescence for type II collagen (mouse anti-collagen type II monoclonal antibody MAB8887, Millipore, Billerica, Mass.) after antigen retrieval with pepsin (Thermo Scientific, Fremont, Calif.).

iCasp9-ΔCD19 Retrovirus Production and Transduction of MSCs

[0511] The SFG.iCasp9.2A.ΔCD19 (iCasp-ΔCD19) retrovirus consists of iCasp9 linked, via a cleavable 2A-like sequence, to truncated human CD19 (ΔCD19). As noted above, iCasp9 is a human FK506-binding protein (FKBP12) with an F36V mutation, which increases the binding affinity of the protein to a synthetic homodimerizer (AP20187 or AP1903), connected via a Ser-Gly-Gly-Gly-Ser-Gly linker to human Caspase-9, whose recruitment domain (CARD) has been deleted, its function replaced by FKBP12.

[0512] The 2A-like sequence encodes a 20 amino acid peptide from Thosea Asigna insect virus, which mediates more than 99% cleavage between a glycine and terminal proline residue, to ensure separation of iCasp9 and ΔCD19 upon translation. ΔCD19 consists of human CD19 truncated at amino acid 333, which removes all conserved intracytoplasmic tyrosine residues that are potential sites for phosphorylation. A stable PG13 clone producing Gibbon ape leukemia virus (Gal-V) pseudotyped retrovirus was made by transiently transfecting Phoenix Eco cell line (ATCC product #SD3444; ATCC, Manassas, Va.) with SFG.iCasp9.2A.ΔCD19, which yielded Eco-pseudotyped retrovirus. The PG13 packaging cell line (ATCC) was transduced 3 times with Eco-pseudotyped retrovirus to generate a producer line that contained multiple SFG.iCasp9.2A.ΔCD19 proviral integrants per cell. Single-cell cloning was performed, and the PG13 clone that produced the highest titer was expanded and used for vector production. Retroviral supernatant was obtained via culture of the producer cell lines in IMDM (Invitrogen) with 10% FBS, 2 mM alanyl-glutamine, 100 units/mL penicillin and 100 μg/mL streptomycin. Supernatant containing the retrovirus was collected 48 and 72 hours after initial culture. For transduction, approximately 2×10⁴ MSCs/cm² were plated in CM in 6-well plates, T75 or T175 flasks. After 24 hours, medium was replaced by viral supernatant diluted 10-fold together with polybrene (final concentration 5 μg/mL) and the cells were incubated at 37° C. in 5% CO₂ for 48 hours, after which cells were maintained in complete medium.

### Cell Enrichment

[0513] For inducible iCasp9-ΔCD19-positive MSC selection for in vitro experiments, retrovirally transduced MSC were enriched for CD19-positive cells using magnetic beads (Miltenyi Biotec) conjugated with anti-CD19 (clone 4G7), per manufacturer instructions. Cell samples were stained with PE- or APC-conjugated CD19 (clone SJ25C1) antibody to assess the purity of the cellular fractions.

### Apoptosis Studies In Vitro

[0514] Undifferentiated MSCs. The chemical inducer of dimerization (CID) (AP20187; ARIAD Pharmaceuticals, Cambridge, Mass.) was added at 50 nM to iCasp9-transduced MSCs cultures in complete medium. Apoptosis was evaluated 24 hours later by FACS analysis, after cell harvest and staining with annexin V-PE and 7-AAD in annexin V binding buffer (BD Biosciences, San Diego, Calif.). Control iCasp9-transduced MSCs were maintained in culture without exposure to CID.

[0515] Differentiated MSCs. Transduced MSCs were differentiated as presented above. At the end of the differentiation period, CID was added to the differentiation media at 50 nM. Cells were stained appropriately for the tissue being studied, as presented above, and a contrast stain (methylene azur or methylene blue) was used to evaluate the nuclear and cytoplasmic morphology. In parallel, tissues were processed for terminal deoxynucleotidyl-transferase dUTP nick end labeling (TUNEL) assay as per manufacturer instructions (In Situ Cell Death Detection Kit, Roche Diagnostics, Mannheim, Germany). For each time point, four random fields were photographed at a final magnification of 40× and the images were analyzed with ImageJ software version 1.43o (NIH, Bethesda, Md.). Cell density was calculated as the number of nuclei (DAPI positivity) per unit of surface area (in mm²). The percentage of apoptotic cells was determined as the ratio of the number of nuclei with positive TUNEL signal (FITC positivity) to the total number of nuclei. Controls were maintained in culture without CID.

### In Vivo Killing Studies in Murine Model

[0516] All mouse experiments were performed in accordance with the Baylor College of Medicine animal husbandry guidelines. To assess the persistence of modified MSCs in vivo, a SCID mouse model was used in conjunction with an in vivo imaging system. MSCs were transduced with retroviruses coding for the enhanced green fluorescent protein-firefly luciferase (eGFP-FFLuc) gene alone or together with the iCasp9-ΔCD19 gene. Cells were sorted for eGFP positivity by fluorescence activated cell sorting using a MoFlo flow cytometer (Beckman Coulter, Fullerton, Calif.). Doubly transduced cells were also stained with PE-conjugated anti-CD19 and sorted for PE-positivity. SCID mice (8-10 weeks old) were injected subcutaneously with 5×10⁵ MSCs with and without iCasp9-ΔCD19 in opposite flanks. Mice received two intraperitoneal injections of 50 μg of CID 24 hours apart starting a week later. For in vivo imaging of MSCs expressing eGFP-FFLuc, mice were injected intraperitoneally with D-luciferin (150 mg/kg) and analyzed using the Xenogen-IVIS Imaging System. Total luminescence (a measurement proportional to the total labeled MSCs deposited) at each time point was calculated by automatically defining regions-of-interest (ROIs) over the MSC implantation sites. These ROIs included all areas with luminescence signals at least 5% above background. Total photon counts were integrated for each ROI and an average value calculated. Results were normalized so that time zero would correspond to 100% signal.

[0517] In a second set of experiments, a mixture of 2.5×10⁶ eGFP-FFLuc-labeled MSCs and 2.5×10⁶ eGFP-FFLuc-labeled, iCasp9-ΔCD19-transduced MSCs was injected subcutaneously in the right flank, and the mice received two intraperitoneal injections of 50 μg of CID 24 h apart starting 7 days later. At several time points after CID injection, the subcutaneous pellet of MSCs was harvested using tissue luminescence to identify and collect the whole human specimen and to minimize mouse tissue contamination. Genomic DNA was then isolated using QIAmp® DNA Mini (Qiagen, Valencia, Calif.). Aliquots of 100 ng of DNA were used in a quantitative PCR (qPCR) to determine the number of copies of each transgene using specific primers and probes (for the eGFP-FFLuc construct: forward primer 5′-TCCGCCCTGAGCAAAGAC-3′ (SEQ ID NO: 291), reverse 5′-ACGAACTCCAGCAGGACCAT-3′ (SEQ ID NO: 292), probe 5′ FAM, 6-carboxyfluorescein-ACGAGAAGCGCGATC-3′ MGBNFQ (SEQ ID NO: 293), minor groove binding non-fluorescent quencher; iCasp9-ΔCD19: forward 5′-CTGGAATCTGGCGGTGGAT-3′ (SEQ ID NO: 294), reverse 5′-CAAACTCTCAAGAGCACCGACAT-3′ (SEQ ID NO: 295), probe 5′ FAM-CGGAGTCGACGGATT-3′ MGBNFQ (SEQ ID NO: 296)). Known numbers of plasmids containing single copies of each transgene were used to establish standard curves. It was determined that approximately 100 ng of DNA isolated from “pure” populations of singly eGFP-FFLuc- or doubly eGFP-FFLuc- and iCasp9-transduced MSCs had similar numbers of eGFP-FFLuc gene copies (approximately 3.0×10⁴), as well as zero and 1.7×10³ of iCasp9-ΔCD19 gene copies, respectively.

[0518] Untransduced human cells and mouse tissues had zero copies of either gene in 100 ng of genomic DNA. Because the copy number of the eGFP gene is the same on identical amounts of DNA isolated from either population of MSCs (iCasp9-negative or positive), the copy number of this gene in DNA isolated from any mixture of cells will be proportional to the total number of eGFP-FFLuc-positive cells (iCasp9-positive plus negative MSCs). Moreover, because iCasp9-negative tissues do not contribute to the iCasp9 copy number, the copy number of the iCasp9 gene in any DNA sample will be proportional to the total number of iCasp9-positive cells. Therefore, if G is the total number of GFP-positive and iCasp9-negative cells and C the total number of GFP-positive and iCasp9-positive cells, for any DNA sample then N_{eGFP}=g·(C+G) and N_{icasp9}=k·C, where N represents gene copy number and g and k are constants relating copy number and cell number for the eGFP and iCasp9 genes, respectively. Thus N_{iCasp9}/N_{eGFP}=(k/g)·[C/(C+G)], i.e., the ratio between iCasp9 copy number and eGFP copy number is proportional to the fraction of doubly transduced (iCasp9-positive) cells among all eGFP positive cells. Although the absolute values of N_{casp9} and N_{eGFP} will decrease with increasing contamination by murine cells in each MSC explant, for each time point the ratio will be constant regardless of the amount of murine tissue included, since both types of human cells are physically mixed. Assuming similar rates of spontaneous apoptosis in both populations (as documented by in vitro culture) the quotient between N_{casp9}/N_{eGFp} at any time point and that at time zero will represent the percentage of surviving iCasp9-positive cells after exposure to CID. All copy number determinations were done in triplicate.

### Statistical Analysis

[0519] Paired 2-tailed Student's t-test was used to determine the statistical significance of differences between samples. All numerical data are represented as mean±1 standard deviation.

### Results

[0520] MSCs are Readily Transduced with iCasp9-ΔCD19 and Maintain their Basic Phenotype

[0521] Flow cytometric analysis of MSCs from 3 healthy donors showed they were uniformly positive for CD73, CD90 and CD105 and negative for the hematopoietic markers CD45, CD14, CD133 and CD34. The mononuclear adherent fraction isolated from bone marrow was homogenously positive for CD73, CD90 and CD105 and negative for hematopoietic markers. The differentiation potential, of isolated MSCs, into adipocytes, osteoblasts and chondroblasts was confirmed in specific assays, demonstrating that these cells are bona fide MSCs.

[0522] Early passage MSCs were transduced with an iCasp9-ΔCD19 retroviral vector, encoding an inducible form of Caspase-9. Under optimal single transduction conditions, 47±6% of the cells expressed CD19, a truncated form of which is transcribed in cis with iCasp9, serving as a surrogate for successful transduction and allowing selection of transduced cells. The percentage of cells positive for CD19 was stable for more than two weeks in culture, suggesting no deleterious or growth advantageous effects of the construct on MSCs. The percentage of CD19-positive cells, a surrogate for successful transduction with iCasp9, remains constant for more than 2 weeks. To further address the stability of the construct, a population of iCasp9-positive cells purified by a fluorescence activated cell sorter (FACS) was maintained in culture: no significant difference in the percentage of CD19-positive cells was observed over six weeks (96.5±1.1% at baseline versus 97.4±0.8% after 43 days, P=0.46). The phenotype of the iCasp9-CD19-positive cells was otherwise substantially identical to that of untransduced cells, with virtually all cells positive for CD73, CD90 and CD105 and negative for hematopoietic markers, confirming that the genetic manipulation of MSCs did not modify their basic characteristics.

iCasp9-ΔCD19 Transduced MSCs Undergo Selective Apoptosis after Exposure to CID In Vitro

[0523] The proapoptotic gene product iCasp9 can activated by a small chemical inducer of dimerization (CID), AP20187, an analogue of tacrolimus that binds the FK506-binding domain present in the iCasp9 product. Non-transduced MSCs have a spontaneous rate of apoptosis in culture of approximately 18% (±7%) as do iCasp9-positive cells at baseline (15±6%, P=0.47). Addition of CID (50 nM) to MSC cultures after transduction with iCasp9-ΔCD19 results in the apoptotic death of more than 90% of iCasp9-positive cells within 24 hrs (93±1%, P<0.0001), while iCasp9-negative cells retain an apoptosis index similar to that of non-transduced controls (20±7%, P=0.99 and P=0.69 vs. non-transduced controls with or without CID respectively) (see FIGS. 17A and 70B). After transduction of MSCs with iCasp9, the chemical inducer of dimerization (CID) was added at 50 nM to cultures in complete medium. Apoptosis was evaluated 24 hours later by FACS analysis, after cell harvest and staining with annexin V-PE and 7-AAD. Ninety-three percent of the iCasp9-CD19-positive cells (iCasp pos/CID) became annexin positive versus only 19% of the negative population (iCasp neg/CID), a proportion comparable to non-transduced control MSC exposed to the same compound (Control/CID, 15%) and to iCasp9-CD19-positive cells unexposed to CID (iCasp pos/no CID, 13%), and similar to the baseline apoptotic rate of non-transduced MSCs (Control/no CID, 16%). Magnetic immunoselection of iCap9-CD19-positive cells can be achieved to high degree of purity. More than 95% of the selected cells become apoptotic after exposure to CID.

[0524] Analysis of a highly purified iCasp9-positive population at later time points after a single exposure to CID shows that the small fraction of iCasp9-negative cells expands and that a population of iCasp9-positive cells remains, but that the latter can be killed by re-exposure to CID. Thus, no iCasp9-positive population resistant to further killing by CID was detected. A population of iCasp9-CD19-negative MSCs emerges as early as 24 hours after CID introduction. A population of iCasp9-CD19-negative MSCs is expected since achieving a population with 100% purity is unrealistic and because the MSCs are being cultured in conditions that favor their rapid expansion in vitro. A fraction of iCasp9-CD19-positive population persists, as predicted by the fact that killing is not 100% efficient (assuming, for example, 99% killing of a 99% pure population, the resulting population would have 49.7% iCasp9-positive and 50.3% iCasp9-negative cells). The surviving cells, however, can be killed at later time points by re-exposure to CID.

iCasp9-ΔCD19 Transduced MSCs Maintain the Differentiation Potential of Unmodified MSCs and their Progeny is Killed by Exposure to CID

[0525] To determine if the CID can selectively kill the differentiated progeny of iCasp9-positive MSCs, immunomagnetic selection for CD19 was used to increase the purity of the modified population (>90% after one round of selection. The iCasp9-positive cells thus selected were able to differentiate in vivo into all connective tissue lineages studied (see FIGS. 19A-19Q). Human MSCs were immunomagnetically selected for CD19 (thus iCasp9) expression, with a purity greater than 91%. After culture in specific differentiation media, iCasp9-positive cells were able to give rise to adipocytic (A, oil red and methylene azur), osteoblastic (B, alkaline phosphatase-BCIP/NBT and methylene blue) and chondroblastic lineages (C, alcian blue and nuclear red) lineages. These differentiated tissues are driven to apoptosis by exposure to 50 nM CID (D-N). Note numerous apoptotic bodies (arrows), cytoplasmic membrane blebbing (inset) and loss of cellular architecture (D and E); widespread TUNEL positivity in chondrocytic nodules (F-H), and adipogenic (I-K) and osteogenic (L-N) cultures, in contrast to that seen in untreated iCasp9-transduced controls (adipogenic condition shown, O-Q) (F, I, L, O, DAPI; G, J, M, P,TUNEL-FITC; H, K, N, Q, overlay). After 24 hours of exposure to 50 nM of CID, microscopic evidence of apoptosis was observed with membrane blebbing, cell shrinkage and detachment, and presence of apoptotic bodies throughout the adipogenic and osteogenic cultures. A TUNEL assay showed widespread positivity in adipogenic and osteogenic cultures and the chondrocytic nodules (see FIGS. 19A-19Q), which increased over time. After culture in adipocytic differentiation media, iCasp9-positive cells gave rise to adipocytes. After exposure to 50 nM CID, progressive apoptosis was observed as evidenced by an increasing proportion of TUNEL-positive cells. After 24 hours, there was a significant decrease in cell density (from 584 cells/mm2 to <14 cells/mm2), with almost all apoptotic cells having detached from the slides, precluding further reliable calculation of the proportion of apoptotic cells. Thus, iCasp9 remained functional even after MSC differentiation, and its activation results in the death of the differentiated progeny.

iCasp9-ΔCD19 Transduced MSCs Undergo Selective Apoptosis after In Vivo Exposure to CID

[0526] Although intravenously injected MSC already appear to have a short in vivo survival time, cells injected locally may survive longer and produce correspondingly more profound adverse effects. To assess the in vivo functionality of the iCasp9 suicide system in such a setting, SCID mice were subcutaneously injected with MSCs. MSCs were doubly transduced with the eGFP-FFLuc (previously presented) and iCasp9-ΔCD19 genes. MSCs were also singly transduced with eGFP-FFLuc. The eGFP-positive (and CD19-positive, where applicable) fractions were isolated by fluorescence activated cell sorting, with a purity >95%. Each animal was injected subcutaneously with iCasp9-positive and control MSCs (both eGFP-FFLuc-positive) in opposite flanks. Localization of the MSCs was evaluated using the Xenogen-IVIS Imaging System. In another set of experiments, a 1:1 mixture of singly and doubly transduced MSCs was injected subcutaneously in the right flank and the mice received CID as above. The subcutaneous pellet of MSCs was harvested at different time points, genomic DNA was isolated and qPCR was used to determine copy numbers of the eGFP-FFLuc and iCasp9-ΔCD19 genes. Under these conditions, the ratio of the iCasp9 to eGFP gene copy numbers is proportional to the fraction of iCasp9-positive cells among total human cells (see Methods above for details). The ratios were normalized so that time zero corresponds to 100% of iCasp9-positive cells. Serial examination of animals after subcutaneous inoculation of MSCs (prior to CID injection) shows evidence of spontaneous apoptosis in both cell populations (as demonstrated by a fall in the overall luminescence signal to ˜20% of the baseline). This has been previously observed after systemic and local delivery of MSCs in xenogeneic models.

[0527] The luminescence data showed a substantial loss of human MSCs over the first 96 h after local delivery of MSCs, even before administration of CID, with only approximately 20% cells surviving after one week. From that time point onward, however, there were significant differences between the survival of icasp9-positive MSCs with and without dimerizer drug. Seven days after MSC implantation, animals were given two injections of 50 μg of CID, 24 hours apart. MSCs transduced with iCasp9 were quickly killed by the drug, as demonstrated by the disappearance of their luminescence signal. Cells negative for iCasp9 were not affected by the drug. Animals not injected with the drug showed persistence of signal in both populations up to a month after MSC implantation. To further quantify cell killing, qPCR assays were developed to measure copy numbers of the eGFP-FFLuc and iCasp9-ΔCD19 genes. Mice were injected subcutaneously with a 1:1 mixture of doubly and singly transduced MSCs and administered CID as above, one week after MSC implantation. MSCs explants were collected at several time points, genomic DNA isolated from the samples and qPCR assays performed on substantially identical amounts of DNA. Under these conditions (see Methods), at any time point, the ratio of iCasp9-ΔCD19 to eGFP-FFLuc copy numbers is proportional to the fraction of viable iCasp9-positive cells. Progressive killing of iCasp9-positive cells was observed (>99%) so that the proportion of surviving iCasp9-positive cells was reduced to 0.7% of the original population after one week. Therefore, MSCs transduced with iCasp9 can be selectively killed in vivo after exposure to CID, but otherwise persist.

### Discussion

[0528] The feasibility of engineering human MSCs to express a safety mechanism using an inducible suicide protein is demonstrated herein. The date presented herein show that MSC can be readily transduced with the suicide gene iCasp9 coupled to the selectable surface maker CD19. Expression of the co-transduced genes is stable both in MSCs and their differentiated progeny, and does not evidently alter their phenotype or potential for differentiation. These transduced cells can be killed in vitro and in vivo when exposed to the appropriate small molecule chemical inducer of dimerization that binds to the iCasp9.

[0529] For a cell based therapy to be successful, transplanted cells must survive the period between their harvest and their ultimate in vivo clinical application. Additionally, a safe cell based therapy also should include the ability to control the unwanted growth and activity of successfully transplanted cells. Although MSCs have been administered to many patients without notable side effects, recent reports indicate additional protections, such as the safety switch presented herein, may offer additional methods of control over cell based therapies as the potential of transplanted MSC to be genetically and epigenetically modified to enhance their functionality, and to differentiate into lineages including bone and cartilage is further investigated and exploited. Subjects receiving MSCs that have been genetically modified to release biologically active proteins might particularly benefit from the added safety provided by a suicide gene.

[0530] The suicide system presented herein offers several potential advantages over other known suicide systems. Strategies involving nucleoside analogues, such as those combining Herpes Simplex Virus thymidine kinase (HSV-tk) with gancyclovir (GCV) and bacterial or yeast cytosine deaminase (CD) with 5-fluoro-cytosine (5-FC), are cell-cycle dependent and are unlikely to be effective in the post-mitotic tissues that may be formed during the application of MSCs to regenerative medicine. Moreover, even in proliferating tissues the mitotic fraction does not comprise all cells, and a significant portion of the graft may survive and remain dysfunctional. In some instance, the prodrugs required for suicide may themselves have therapeutic uses that are therefore excluded (e.g., GCV), or may be toxic (e.g., 5-FC), either as a result of their metabolism by non-target organs (e.g., many cytochrome P450 substrates), or due to diffusion to neighboring tissues after activation by target cells (e.g., CB1954, a substrate for bacterial nitroreductase).

[0531] In contrast, the small molecule chemical inducers of dimerization presented herein have shown no evidence of toxicities even at doses ten fold higher than those required to activate the iCasp9. Additionally, nonhuman enzymatic systems, such as HSV-tk and DC, carry a high risk of destructive immune responses against transduced cells. Both the iCasp9 suicide gene and the selection marker CD19, are of human origin, and thus should be less likely to induce unwanted immune responses. Although linkage of expression of the selectable marker to the suicide gene by a 2A-like cleavable peptide of nonhuman origin could pose problems, the 2A-like linker is 20 amino acids long, and is likely less immunogenic than a nonhuman protein. Finally, the effectiveness of suicide gene activation in iCasp9-positive cells compares favorably to killing of cells expressing other suicide systems, with 90% or more of iCasp9-modified T cells eliminated after a single dose of dimerizer, a level that is likely to be clinically efficacious.

[0532] The iCasp9 system presented herein also may avoid additional limitations seen with other cell based and/or suicide switch based therapies. Loss of expression due to silencing of the transduced construct is frequently observed after retroviral transduction of mammalian cells. The expression constructs presented herein showed no evidence of such an effect. No decrease in expression or induced death was evident, even after one month in culture.

[0533] Another potential problem sometimes observed in other cell based and/or suicide switch based therapies, is the development of resistance in cells that have upregulated anti-apoptotic genes. This effect has been observed in other suicide systems involving different elements of the programmed cell death pathways such as Fas. iCasp9 was chosen as the suicide gene for the expression constructs presented herein because it was less likely to have this limitation. Compared to other members of the apoptotic cascade, activation of Caspase-9 occurs late in the apoptotic pathway and therefore should bypass the effects of many if not all anti-apoptotic regulators, such as c-FLIP and bcl-2 family members.

[0534] A potential limitation specific to the system presented herein may be spontaneous dimerization of iCasp9, which in turn could cause unwanted cell death and poor persistence. This effect has been observed in certain other inducible systems that utilize Fas. The observation of low spontaneous death rate in transduced cells and long term persistence of transgenic cells in vivo indicate this possibility is not a significant consideration when using iCasp9 based expression constructs.

[0535] Integration events deriving from retroviral transduction of MSCs may potentially drive deleterious mutagenesis, especially when there are multiple insertions of the retroviral vector, causing unwanted copy number effects and/or other undesirable effects. These unwanted effects could offset the benefit of a retrovirally transduced suicide system. These effects often can be minimized using clinical grade retroviral supernatant obtained from stable producer cell lines and similar culture conditions to transduce T lymphocytes. The T cells transduced and evaluated herein contain in the range of about 1 to 3 integrants (the supernatant containing in the range of about 1×10⁶ viral particles/mL). The substitution of lentiviral for retroviral vectors could further reduce the risk of genotoxicity, especially in cells with high self-renewal and differentiation potential.

[0536] While a small proportion of iCasp9-positive MSCs persists after a single exposure to CID, these surviving cells can subsequently be killed following re-exposure to CID. In vivo, there is >99% depletion with two doses, but it is likely that repeated doses of CID will be needed for maximal depletion in the clinical setting. Additional non-limiting methods of providing extra safety when using an inducible suicide switch system include additional rounds of cell sorting to further increase the purity of the cell populations administered and the use of more than one suicide gene system to enhance the efficiency of killing.

[0537] The CD19 molecule, which is physiologically expressed by B lymphocytes, was chosen as the selectable marker for transduced cells, because of its potential advantages over other available selection systems, such as neomycin phosphotransferase (neo) and truncated low affinity nerve growth factor receptor (ΔLNGFR). “neo” encodes a potentially immunogenic foreign protein and requires a 7-day culture in selection medium, increasing the complexity of the system and potentially damaging the selected cells. ΔLNGFR expression should allow for isolation strategies similar to other surface markers, but these are not widely available for clinical use and a lingering concern remains about the oncogenic potential of ΔLNGFR. In contrast, magnetic selection of iCasp9-positive cells by CD19 expression using a clinical grade device is readily available and has shown no notable effects on subsequent cell growth or differentiation.

[0538] The procedure used for preparation and administration of mesenchymal stromal cells comprising the Caspase-9 safety switch may also be used for the preparation of embryonic stem cells and inducible pluripotent stem cells. Thus for the procedures outlined in the present example, either embryonic stem cells or inducible pluripotent stem cells may be substituted for the mesenchymal stromal cells provided in the example. In these cells, retroviral and lentiviral vectors may be used, with, for example, CMV promoters, or the ronin promoter.

### Example 6

### Modified Caspase-9 Polypeptides with Lower Basal Activity and Minimal Loss of Ligand IC₅₀

[0539] Basal signaling, signaling in the absence of agonist or activating agent, is prevalent in a multitude of biomolecules. For example, it has been observed in more than 60 wild-type G protein coupled receptors (GPCRs) from multiple subfamilies [1], kinases, such as ERK and abl [2], surface immunoglobulins [3], and proteases. Basal signaling has been hypothesized to contribute to a vast variety of biological events, from maintenance of embryonic stem cell pluripotency, B cell development and differentiation [4-6], T cell differentiation [2, 7], thymocyte development [8], endocytosis and drug tolerance [9], autoimmunity [10], to plant growth and development [11]. While its biological significance is not always fully understood or apparent, defective basal signaling can lead to serious consequences. Defective basal Gₛ protein signaling has led to diseases, such as retinitis pigmentosa, color blindness, nephrogenic diabetes insipidus, familial ACTH resistance, and familial hypocalciuric hypercalcemia [12, 13].

[0540] Even though homo-dimerization of wild-type initiator Caspase-9 is energetically unfavorable, making them mostly monomers in solution [14-16], the low-level inherent basal activity of unprocessed Caspase-9 [15, 17] is enhanced in the presence of the Apaf-1-based “apoptosome”, its natural allosteric regulator [6]. Moreover, supra-physiological expression levels and/or co-localization could lead to proximity-driven dimerization, further enhancing basal activation.

[0541] In the chimeric unmodified Caspase-9 polypeptide, innate Caspase-9 basal activity was significantly diminished by removal of the CAspase-Recruitment pro-Domain (CARD) [18], replacing it with the cognate high affinity AP1903-binding domain, FKBP12-F36V. Its usefulness as a pro-apoptotic “safety switch” for cell therapy has been well demonstrated in multiple studies [18-20]. While its high specific and low basal activity has made it a powerful tool in cell therapy, in contrast to G protein coupled receptors, there are currently no “inverse agonists” [21] to eliminate basal signaling, which may be desirable for manufacturing, and in some applications. Preparation of Master Cell Banks has proven challenging due to high amplification of the low-level basal activity of the chimeric polypeptide. In addition, some cells are more sensitive than others to low-level basal activity of Caspase-9, leading to unintended apoptosis of transduced cells [18].

[0542] To modify the basal activity of the chimeric Caspase-9 polypeptide, “rational design”-based methods were used to engineer 75i Casp9 mutants based on residues known to play crucial roles in homo-dimerization, XIAP-mediated inhibition, or phosphorylation (Table below) rather than “directed evolution” [22] that use multiple cycles of screening as selective pressure on randomly generated mutants. Dimerization-driven activation of Caspase-9 has been considered a dominant model of initiator Caspase activation [15, 23, 24]. To reduce spontaneous dimerization, site-directed mutagenesis was conducted of residues crucial for homo-dimerization and thus basal Caspase-9 signaling. Replacement of five key residues in the β6 strand (G402-C-F-N-F406 (SEQ ID NO: 297)), the key dimerization interface of Caspase-9, with those of constitutively dimeric effector Caspase-3 (C264-I-V-S-M268 (SEQ ID NO: 298)) converted it to a constitutively dimeric protein unresponsive to Apaf-1 activation without significant structural rearrangements [25]. To modify spontaneous homo-dimerization, systemic mutagenesis of the five residues was made, based on amino acid chemistry, and on corresponding residues of initiator Caspases-2, -8, -9, and -10 that exist predominately as a monomer in solution [14, 15]. After making and testing twenty-eight iCasp9 mutants by a secreted alkaline phosphatase (SEAP)-based surrogate killing assay (Table, below), the N405Q mutation was found to lower basal signaling with a moderate (<10-fold) cost of higher IC₅₀ to AP1903.

[0543] Since proteolysis, typically required for Caspase activation, is not absolutely required for Caspase-9 activation [26], the thermodynamic “hurdle” was increased to inhibit auto-proteolysis. In addition, since XIAP-mediated Caspase-9 binding traps Caspase-9 in a monomeric state to attenuate its catalytic and basal activity [14], there was an effort to strengthen the interaction between XIAP and Caspase-9 by mutagenizing the tetrapeptide critical for interaction with XIAP (A316-T-P-F319 (SEQ ID NO: 299), D330-A-I-S-S334 (SEQ ID NO: 301)). From 17 of these iCasp-9 mutants, it was determined that the D330A mutation lowered basal signaling with a minimum (<5-fold) AP1903IC₅₀ cost.

[0544] The third approach was based on previously reported findings that Caspase-9 is inhibited by kinases upon phosphorylation of S144 by PKC-ζ [27], S183 by protein kinase A [28], S196 by Akt1 [29], and activated upon phosphorylation of Y153 by c-abl [30]. These “brakes” might improve the IC₅₀, or substitutions with phosphorylation mimic (“phosphomimetic”) residues could augment these “brakes” to lower basal activity. However, none of the 15 single residue mutants based on these residues successfully lowered the IC₅₀ to AP1903.

[0545] Methods such as those discussed, for example, in Examples 1-5, and throughout the present application may be applied, with appropriate modifications, if necessary to the chimeric modified Caspase-9 polypeptides, as well as to various therapeutic cells.

### Example 7

### Materials and Methods

### PCR Site-Directed Mutagenesis of Caspase-9:

[0546] To modify basal signaling of Caspase-9, PCR-based site directed mutagenesis [31] was done with mutation-containing oligos and Kapa (Kapa Biosystems, Woburn, Mass.). After 18 cycles of amplification, parental plasmid was removed with methylation-dependent DpnI restriction enzyme that leaves the PCR products intact. 2 μl of resulting reaction was used to chemically transform XL1-blue or DH5a. Positive mutants were subsequently identified via sequencing (Seq Wright, Houston, Tex.).

### Cell Line Maintenance and Transfection:

[0547] Early passage HEK293T/16 cells (ATCC, Manassas, Va.) were maintained in IMDM, GlutaMAX™ (Life Technologies, Carlsbad, Calif.) supplemented with 10% FBS, 100 U/mL penicillin, and 100 U/mL streptomycin until transfection in a humidified, 37° C., 5% CO₂/95% air atmosphere. Cells in logarithmic-phase growth were transiently transfected with 800 ng to 2 μg of expression plasmid encoding iCasp9 mutants and 500 ng of an expression plasmid encoding SRα promoter driven SEAP per million cells in 15-mL conical tubes. Catalytically inactive Caspase-9 (C285A) (without the FKBP domain) or “empty” expression plasmid (“pSH1-null”) were used to keep the total plasmid levels constant between transfections. GeneJammer® Transfection Reagent at a ratio of 3 μl per ug of plasmid DNA was used to transiently transfect HEK293T/16 cells in the absence of antibiotics. 100 μl or 2 mL of the transfection mixture was added to each well in 96-well or 6-well plate, respectively. For SEAP assays, log dilutions of AP1903 were added after a minimum 3-hour incubation post-transfection. For western blots, cells were incubated for 20 minutes with AP1903 (10 nM) before harvesting.

### Secreted Alkaline Phosphatase (SEAP) Assay:

[0548] Twenty-four to forty-eight hours after AP1903 treatment, ˜100 μl of supernatants were harvested into a 96-well plate and assayed for SEAP activity as discussed [19, 32]. Briefly, after 65° C. heat denaturation for 45 minutes to reduce background caused by endogenous (and serum-derived) alkaline phosphatases that are sensitive to heat, 5 μl of supernatants was added to 95 μl of PBS and added to 100 μl of substrate buffer, containing 1 μl of 100 mM 4-methylumbelliferyl phosphate (4-MUP; Sigma, St. Louis, Mo.) re-suspended in 2 M diethanolamine. Hydrolysis of 4-MUP by SEAP produces a fluorescent substrate with excitation/emission (355/460 nm), which can be easily measured. Assays were performed in black opaque 96-well plates to minimize fluorescence leakage between wells. To examine both basal signaling and AP1903 induced activity, 106 early-passage HEK293T/16 cells were co-transfected with various amount of wild type Caspase and 500 ng of an expression plasmid that uses an SRα promoter to drive SEAP, a marker for cell viability. Following manufacturer's suggestions, 1 mL of IMDM+10% FBS without antibiotics was added to each mixture. 1000-ul of the mixture was seeded onto each well of a 96-well plate. 100-ul of AP1903 was added at least three hours post-transfection. After addition of AP1903 for at least 24 hours, 100-ul of supernatant was transferred to a 96-well plate and heat denatured at 68° C. for 30 minutes to inactivate endogenous alkaline phosphatases. For the assay, 4-methylumbelliferyl phosphate substrate was hydrolyzed by SEAP to 4-methylumbelliferon, a metabolite that can be excited with 364 nm and detected with an emission filter of 448 nm. Since SEAP is used as a marker for cell viability, reduced SEAP reading corresponds with increased iCaspase-9 activities. Thus, a higher SEAP reading in the absence of AP1903 would indicate lower basal activity. Desired caspase mutants would have diminished basal signaling with increased sensitivity (i.e., lower IC₅₀) to AP1903. The goal of the study is to reduce basal signaling without significantly impairing IC₅₀.

### Western Blot Analysis:

[0549] HEK293T/16 cells transiently transfected with 2 μg of plasmid for 48-72 hours were treated with AP1903 for 7.5 to 20 minutes (as indicated) at 37° C. and subsequently lysed in 500 μl of RIPA buffer (0.01 M Tris-HCl, pH 8.0/140 mM NaCl/1% Triton X-100/1 mM phenylmethylsulfonyl fluoride/1% sodium deoxycholate/0.1% SDS) with Halt™ Protease Inhibitor Cocktail. The lysates were collected and lysed on ice for 30 min. After pelleting cell debris, protein concentrations from overlying supernatants were measured in 96-well plates with BCA™ Protein Assay as recommended by the manufacturer. 30 μg of proteins were boiled in Laemmli sample buffer (Bio-Rad, Hercules, Calif.) with 2.5% 2-mercaptoethanol for 5 min at 95° C. before being separated by Criterion TGX 10% Tris/glylcine protein gel. Membranes were probed with 1/1000 rabbit anti-human Caspase-9 polyclonal antibody followed by 1/10,000 HRP-conjugated goat anti-rabbit IgG F(ab′)2 secondary antibody (Bio-Rad). Protein bands were detected using Supersignal West Femto chemiluminescent substrate. To ensure equivalent sample loading, blots were stripped at 65° C. for 1 hour with Restore PLUS Western Blot Stripping Buffer before labeling with 1/10,000 rabbit anti-actin polyclonal antibody. Unless otherwise stated, all the reagents were purchased from Thermo Scientific.

[0550] Methods and constructs discussed in Examples 1-5, and throughout the present specification may also be used to assay and use the modified Caspase-9 polypeptides.

### Example 8

### Evaluation and Activity of Chimeric Modified Caspase-9 Polypeptides

### Comparison of Basal Activity and AP1903 Induced Activity:

[0551] To examine both basal activity and AP1903 induced activity of the chimeric modified Caspase-9 polypeptides, SEAP activities of HEK293T/16 cells co-transfected with SEAP and different amounts of iCasp9 mutants were examined. iCasp9 D330A, N405Q, and D330A-N405Q showed significantly less basal activity than unmodified iCasp9 for cells transfected with either 1 μg iCasp9 per million cells (relative SEAP activity Units of 148928, 179081, 205772 vs. 114518) or 2 μg iCasp9 per million cells (136863, 175529, 174366 vs. 98889). The basal signaling of all three chimeric modified Caspase-9 polypeptides when transfected at 2 μg per million cells was significantly higher (p value <0.05). iCasp9 D330A, N405Q, and D330A-N405Q also showed increased estimated IC₅₀s for AP1903, but they are all still less than 6 pM (based on the SEAP assay), compared to 1 pM for WT, making them potentially useful apoptosis switches.

### Evaluation of Protein Expression Levels and Proteolysis:

[0552] To exclude the possibility that the observed reduction in basal activity of the chimeric modified Caspase-9 polypeptides was attributable to decreased protein stability or variation in transfection efficiency, and to examine auto-proteolysis of iCasp9, the protein expression levels of Caspase-9 variants in transfected HEK293T/16 cells was assayed. Protein levels of chimeric unmodified Caspase-9 polypeptide, iCasp9 D330A, and iCasp9 D330A-N405Q all showed similar protein levels under the transfection conditions used in this study. In contrast, the iCasp9 N405Q band appeared darker than the others, particularly when 2 μg of expression plasmids was used. Auto-proteolysis was not easily detectable at the transfection conditions used, likely because only viable cells were collected. Anti-actin protein reblotting confirmed that comparable lysate amounts were loaded into each lane. These results support the observed lower basal signaling in the iCasp9 D330A, N405Q, and D330A-N405Q mutants, observed by SEAP assays.

### Discussion

[0553] Based on the SEAP screening assay, these three chimeric modified Caspase-9 polypeptides showed higher AP1903-independent SEAP activity, compared to iCasp9 VVT transfectants, and hence lower basal signaling. However, the double mutation (D330-N405Q) failed to further decrease either basal activity or IC₅₀ (0.05 nM) vs. the single amino acid mutants. The differences observed did not appear to be due to protein instability or differential amount of plasmids used during transfection.

### Example 9

### Evaluation and Activity of Chimeric Modified Caspase-9 Polypeptides

[0554] Inducible Caspase-9 provides for rapid, cell-cycle-independent, cell autonomous killing in an AP1903-dependent fashion. Improving the characteristics of this inducible Caspase-9 polypeptide would allow for even broader applicability. It is desirable to decrease the protein's ligand-independent cytotoxicity, and increase its killing at low levels of expression. Although ligand-independent cytotoxicity is not a concern at relatively low levels of expression, it can have a material impact where levels of expression can reach one or more orders of magnitude higher than in primary target cells, such as during vector production. Also, cells can be differentially sensitive to low levels of caspase expression due to the level of apoptosis inhibitors, like XIAP and Bcl-2, which cells express. Therefore, to re-engineer the caspase polypeptide to have a lower basal activity and possibly higher sensitivity to AP1903 ligand, four mutagenesis strategies were devised.

[0555] Dimerization Domain: Although Caspase-9 is a monomer in solution at physiological levels, at high levels of expression, such as occurs in the pro-apoptotic, Apaf-driven “apoptosome”, Caspase-9 can dimerize, leading to auto-proteolysis at D315 and a large increase in catalytic activity. Since C285 is part of the active site, mutation C285A is catalytically inactive and is used as a negative control construct. Dimerization involves very close interaction of five residues in particular, namely G402, C403, F404, N405, and F406. For each residue, a variety of amino acid substitutions, representing different classes of amino acids (e.g., hydrophobic, polar, etc.) were constructed. Interestingly, all mutants at G402 (i.e., G402A, G4021, G402Q, G402Y) and C403P led to a catalytically inactive caspase polypeptide. Additional C403 mutations (i.e., C403A, C403S, and C403T) were similar to the wild type caspase and were not pursued further. Mutations at F404 all lowered basal activity, but also reflected reduced sensitivity to IC₅₀, from ˜1 log to unmeasurable. In order of efficacy, they are: F404Y>F404T, F404W>>F404A, F404S. Mutations at N405 either had no effect, as with N405A, increased basal activity, as in N405T, or lowered basal activity concomitant with either a small (˜5-fold) or larger deleterious effect on IC₅₀, as with N405Q and N405F, respectively. Finally, like F404, mutations at F406 all lowered basal activity, and reflected reduced sensitivity to IC₅₀, from ˜1 log to unmeasurable. In order of efficacy, they are: F406A F406W, F406Y>F406T>>F406L.

[0556] Some polypeptides were constructed and tested that had compound mutations within the dimerization domain, but substituting the analogous 5 residues from other caspases, known to be monomers (e.g., Caspase-2, -8, -10) or dimers (e.g., Caspase-3) in solution. Caspase-9 polypeptides, containing the 5-residue change from Caspase-2, -3, and -8, along with an AAAAA (SEQ ID NO: 302) alanine substitution were all catalytically inactive, while the equivalent residues from Caspase-10 (ISAQT (SEQ ID NO: 303)), led to reduced basal activity but higher IC₅₀.

[0557] Overall, based on the combination of consistently lower basal activity, combined with only a mild effect on IC₅₀, N405Q was selected for further experiments. To improve on efficacy, a codon-optimized version of the modified Caspase-9 polypeptide, having the N405Q substitution, called N405Qco, was tested. This polypeptide appeared marginally more sensitive to AP1903 than the wild type N405Q-substituted Caspase-9 polypeptide.

[0558] Cleavage site mutants: Following aggregation of Caspase-9 within the apoptosome or via AP1903-enforced homodimerization, auto-proteolysis at D315 occurs. This creates a new amino-terminus at A316, at least transiently. Interestingly, the newly revealed tetra-peptide, ³¹⁶ATPF³¹⁹ (SEQ ID NO: 299), binds to the Caspase-9 inhibitor, XIAP, which competes for dimerization with Caspase-9 itself at the dimerization motif, GCFNF, discussed above. Therefore, the initial outcome of D315 cleavage is XIAP binding, attenuating further Caspase-9 activation. However, a second caspase cleavage site exists at D330, which is the target of downstream effector caspase, caspase-3. As the pro-apoptotic pressure builds, D330 becomes increasingly cleaved, releasing the XIAP-binding small peptide within residue 316 to 330, and hence, removing this mitigating Caspase-9 inhibitor. A D330A mutant was constructed, which lowered basal activity, but not as low as in N405Q. By SEAP assay at high copy number, it also revealed a slight increase in IC₅₀, but at low copy number in primary T cells, there was actually a slight increase in IC₅₀ with improved killing of target cells. Mutation at auto-proteolysis site, D315, also reduced basal activity, but this led to a large increase in IC₅₀, likely as D330 cleavage was then necessary for caspase activation. A double mutation at D315A and D330A, led to an inactive “locked” Caspase-9 that could not be processed properly.

[0559] Other D330 mutants were created, including D330E, D330G, D330N, D330S, and D330V. Mutation at D327 also prevented cleavage at D330, as the consensus Caspase-3 cleavage site is DxxD, but several D327 mutations (i.e., D327G, D327K, and D327R) along with F326K, Q328K, Q328R, L329K, L329G, and A331K, unlike D330 mutations, did not lower basal activity and were not pursued further.

[0560] XIAP-binding mutants: As discussed above, autoproteolysis at D315 reveals an XIAP-binding tetrapeptide, ³¹⁶ATPF³¹⁹ (SEQ ID NO: 299), which “lures” XIAP into the Caspase-9 complex. Substitution of ATPF (SEQ ID NO: 299) with the analogous XIAP-binding tetrapeptide, AVPI (SEQ ID NO: 304), from mitochondria-derived anti-XIAP inhibitor, SMAC/DIABLO, might bind more tightly to XIAP and lower basal activity. However, this 4-residue substitution had no effect. Other substitutions within the ATPF motif (SEQ ID NO: 299) ranged from no effect, (i.e., T317C, P318A, F319A) to lower basal activity with either a very mild (i.e., T317S, mild (i.e., T317A) to large (i.e., A316G, F319W) increase in IC₅₀. Overall, the effects of changing the XIAP-binding tetrapeptide were mild; nonetheless, T317S was selected for testing in double mutations (discussed below), since the effects on IC₅₀ were the most mild of the group.

[0561] Phosphorylation mutants: A small number of Caspase-9 residues were reported to be the targets of either inhibitory (e.g., S144, S183, S195, S196, S307, T317) or activating (i.e., Y153) phosphorylations. Therefore, mutations that either mimic the phosphorylation (“phosphomimetics”) by substitution with an acidic residue (e.g., Asp) or eliminate phosphorylation were tested. In general, most mutations, regardless of whether a phosphomimetic or not was tried, lowered basal activity. Among the mutants with lower basal activity, mutations at S144 (i.e., S144A and S144D) and S1496D had no discernable effect on IC₅₀, mutants S183A, S195A, and S196A increased the IC₅₀ mildly, and mutants Y153A, Y153A, and S307A had a big deleterious effect on IC₅₀. Due to the combination of lower basal activity and minimal, if any effect on IC₅₀, S144A was chosen for double mutations (discussed below).

[0562] Double mutants: In order to combine the slightly improved efficacy of D330A variant with possible residues that could further lower basal activity, numerous D330A double mutants were constructed and tested. Typically, they maintained lower basal activity with only a slight increase in IC₅₀, including 2nd mutations at N405Q, S144A, S144D, S183A, and S196A. Double mutant D330A-N405T had higher basal activity and double mutants at D330A with Y153A, Y153F, and T317E were catalytically inactive. A series of double mutants with low basal activity N405Q, intended to improve efficacy or decrease the IC₅₀ was tested. These all appeared similar to N405Q in terms of low basal activity and slightly increased IC₅₀ relative to CaspaCIDe-1.0, and included N405Q with S144A, S144D, S196D, and T317S.

[0563] SEAP assays were conducted to study the basal activity and CID sensitivity of some of the dimerization domain mutants. N405Q was the most AP1903-sensitive of the mutants tested with lower basal activity than the VVT Caspase-9, as determined by a shift upwards of AP1903-independent signaling. F406T was the least CID-sensitive from this group.

[0564] The dimer-independent SEAP activity of mutant caspase polypeptides D330A and N405Q was assayed, along with double mutant D330A-N405Q. The results of multiple transfections (N=7 to 13) found that N405Q has lower basal activity than D330A and the double mutant is intermediate.

[0565] Obtaining the average (+stdev, n=5) IC₅₀ of mutant caspase polypeptides D330A and N405Q, along with double mutant D330A-N405Q shows that D330A is somewhat more sensitive to AP1903 than N405Q mutants but about 2-fold less sensitive than WT Caspase-9 in a transient transfection assay.

[0566] SEAP assays were conducted using wild type (WT) Caspase-9, N405Q, inactive C285A, and several T317 mutants within the XIAP-binding domain. The results show that T317S and T317A can reduce basal activity without a large shift in the IC₅₀ to APf1903. Therefore, T317S was chosen to make double mutants with N405Q.

[0567] IC₅₀s from the SEAP assays above showed that T317A and T317S have similar IC₅₀s to wild type Caspase-9 polypeptide despite having lower basal activity.

[0568] The dimer-independent SEAP activity from several D330 mutants showed that all members of this class tested, including D330A, D330E, D330N, D330V, D330G, and D330S, have less basal activity than wild type Caspase-9. Basal and AP1903-induced activation of D330A variants was assayed. SEAP assay of transiently transfected HEK293/16 cells with 1 or 2 ug of mutant caspase polypeptides and 0.5 ug of pSH1-kSEAP per million HEK293 cells, 72 hours post-transfection. Normalized data based on 2 ug of each expression plasmid (including WT) were mixed with normalized data from 1 ug-based transfections. iCasp9-D330A, -D330E, and -D330S showed statistically lower basal signaling than wildtype Caspase-9.

[0569] The result of a western blot shoed that the D330 mutations block cleavage at D330, leading to a slightly largely (slower migrating) small band (<20 kDa marker). Other blots show that D327 mutation also blocks cleavage.

[0570] The mean fluorescence intensities of multiple clones of PG13 transduced 5× with retroviruses encoding the indicated Caspase-9 polypeptides was measured. Lower basal activity typically translates to higher levels of expression of the Caspase-9 gene along with the genetically linked reporter, CD19. The results show that on the average, clones expressing the N405Q mutant express higher levels of CD19, reflecting the lower basal activity of N405Q over D330 mutants or VVT Caspase-9. The effects of various caspase mutations on viral titers derived from PG13 packaging cells cross-transduced with VSV-G envelope-based retroviral supernatants was assayed. To examine the effect of CaspaCIDe-derived basal signaling on retrovirus master cell line production, retrovirus packaging cell line, PG13, was cross-transduced five times with VSV-G-based retroviral supernatants in the presence of 4 μg/ml transfection-enhancer, polybrene. CaspaCIDe-transduced PG13 cells were subsequently stained with PE-conjugated anti-human CD19 antibody, as an indication of transduction. CaspaCIDe-D330A, -D330E, and -N405Q-transduced PG13 cells showed enhanced CD19 mean fluorescence intensity (MFI), indicating higher retroviral copy numbers, implying lower basal activity. To more directly examine the viral titer of the PG13 transductants, HT1080 cells were treated with viral supernatant and 8 ug/ml polybrene. The enhanced CD19 MFIs of iCasp9-D330A, -N405Q, and -D330E transductants vs WT iCasp9 in PG13 cells are positively correlated with higher viral titers, as observed in HT1080 cells. Due to the initially low viral titers (approximately 1E5 transduction units (TU)/ml), no differences in viral titers were observed in the absence of HAT treatment to increase virus yields. Upon HAT media treatment, PG13 cells transduced with CaspaCIDe-D330A, -N405Q, or -D330E demonstrated higher viral titers. Viral titer (transducing units) is calculated with the formula: Viral titer=(# cells on the day of transduction)*(% CD19⁺)/Volume of supernatant (ml). In order to further investigate the effect of CaspaCIDe mutants with lower basal activity, individual clones (colonies) of CaspaCIDe-transduced PG13 cells were selected and expanded. CaspaCIDe-N405Q clones with higher CD19 MFIs than the other cohorts were observed.

[0571] The effects of various caspase polypeptides at mostly single copy in primary T cells was assayed. This may reflect more accurately how these suicide genes will be used therapeutically. Surprisingly, the data show that the D330A mutant is actually more sensitive to AP1903 at low titers and kills at least as well as WT Caspase-9 when tested in a 24-hour assay. The N405Q mutant is less sensitive to AP1903 and cannot kill target cells as efficiently within 24 hours.

[0572] Results of transducing 6 independent T cell samples from separate healthy donors showed that the D330A mutant (mut) is more sensitive to AP1903 than the wild type Caspase-9 polypeptide.

[0573] FIG. 57 shows the average IC₅₀, range and standard deviation from the 6 healthy donors shown in FIG. 56. This data shows that the improvement is statistically significant. The iCasp9-D330A mutant demonstrated improved AP1903-dependent cytotoxicity in transduced T cells. Primary T cells from healthy donors (n=6) were transduced with retrovirus encoding mutant or wild-type iCasp9 or iCasp9-D330A, and the ΔCD19 cell surface marker. Following transduction, iCasp9-transduced T cells were purified using CD19-microbeads and a magnetic column. T cells were then exposed to AP1903 (0-100 nM) and measured for CD3+CD19+ T cells by flow cytometry after 24 hours. The IC₅₀ of iCasp9-D330A was significantly lower (p=0.002) than wild-type iCasp9.

[0574] Results of several D330 mutants, revealed that all six D330 mutants tested (D330A, E, N, V, G, and S) are more sensitive to AP1903 than wild type Caspase-9 polypeptide.

[0575] The N405Q mutant along with other dimerization domain mutants, including N404Y and N406Y, can kill target T cells indistinguishable from wild type Caspase-9 polypeptide or D330A within 10 days. Cells that received AP1903 at Day 0 received a second dose of AP1903 at day 4. This data supports the use of reduced sensitivity Caspase-9 mutants, like N405Q as part of a regulated efficacy switch.

[0576] The results of codon optimization of N405Q caspase polypeptide, called “N405Qco”, revealed that codon optimization, likely leading to an increase in expression only has a very subtle effect on inducible caspase function. This likely reflects the use of common codons in the original Caspase-9 gene.

[0577] The Caspase-9 polypeptide has a dose-response curve in vivo, which could be used to eliminate a variable fraction of T cells expressing the Caspase-9 polypeptide. The data also shows that a dose of 0.5 mg/kg AP1903 is sufficient to eliminate most modified T cells in vivo. AP1903 dose-dependent elimination in vivo of T cells transduced with D330E iCasp9 was assayed. T cells were transduced with SFG-iCasp9-D330E-2A-ΔCD19 retrovirus and injected i.v. into immune deficient mice (NSG). After 24 hours, mice were injected i.p. with AP1903 (0-5 mg/kg). After an additional 24 hours, mice were sacrificed and lymphocytes from the spleen (A) were isolated and analyzed by flow cytometry for the frequency of human CD3+CD19+ T cells. This shows that iCasp9-D330E demonstrates a similar in vivo cytotoxicity profile in response to AP1903 as wild-type iCasp9.

[0578] Conclusions: As discussed, from this analysis of 78 mutants so far, out of the single mutant mutations, the D330 mutations combine somewhat improved efficacy with slightly reduced basal activity. N405Q mutants are also attractive since they have very low basal activity with only slightly decreased efficacy, reflected by a 4-5-fold increase in IC₅₀. Experiments in primary T cells have shown that N405Q mutants can effectively kill target cells, but with somewhat slower kinetics than D330 mutants, making this potentially very useful for a graduated suicide switch that kills partially after an initial dose of AP1903, and up to full killing can be achieved upon a second dose of AP1903.

[0579] The following table provides a summary of basal activity and IC₅₀ for various chimeric modified Caspase-9 polypeptides prepared and assayed according to the methods discussed herein. The results are based on a minimum of two independent SEAP assays, except for a subset (i.e., A316G, T317E, F326K, D327G, D327K, D327R, Q328K, Q328R, L329G, L329K, A331K, S196A, S196D, and the following double mutants: D330A with S144A, S144D, or S183A; and N405Q with S144A, S144D, S196D, or T317S) that were tested once. Four multi-pronged approaches were taken to generate the tested chimeric modified Caspase-9 polypeptides. “Dead” modified Caspase-9 polypeptides were no longer responsive to AP1903. Double mutants are indicated by a hyphen, for example, D330A-N405Q denotes a modified Caspase-9 polypeptide having a substitution at position 330 and a substitution at position 405.

TABLE 5
Caspase Mutant Classes

| | Homodimerization | Cleavage sites & | | Double | Total |
|---|---|---|---|---|---|
| Basal Activity | domain | XIAP Interaction | Phosphorylation | mutants, Misc. | mutants |
| Decreased | | | S144A | | 80 |
| basal and | | | S144D | | *, predicted |
| similar IC₅₀ | | T317S | S196D | | |
| Decreased | N405Q | D330A | S183A | D330A-N405Q | Bold, Tested in |
| basal but | | | | | T cells |
| higher IC₅₀ | ⁴⁰²GCFNF⁴⁰⁶ISAQT (Casp-10) | D330E | S195A | D330A-S144A | |
| | (SEQ ID NOS 297 and 303) | | | | |
| | F404Y | D330G | S196A | D330A-S144D | |
| | F406A | D330N | | D330A-S183A | |
| | F406W | D330S | | D330A-S196A | |
| | F406Y | D330V | | N405Q-S144A | |
| | N405Qco | L329E | | N405Q-S144D | |
| | | T317A | | N405Q-S196D | |
| | | | | N405Q-T317S | |
| | | | | *N405Q-S144Aco | |
| | | | | *N405Q-T317Sco | |
| Decreased | F404T | D315A | Y153A | | |
| basal but | F404W | A316G | Y153F | | |
| much higher | N405F | F319W | S307A | | |
| IC₅₀ | F406T | | | | |
| Similar basal | C403A | ³¹⁶ATPF³¹⁹AVPI | | | |
| and IC₅₀ | | (SMAC/Diablo) | | | |
| | | (SEQ ID NOS 299 and 304) | | | |
| | C403S | T317C | | | |
| | C403T | P318A | | | |
| | N405A | F319A | | | |
| Increased | N405T | T317E | | D330A-N405T | |
| basal | | F326K | | | |
| | | D327G | | | |
| | | D327K | | | |
| | | D327R | | | |
| | | Q328K | | | |
| | | Q328R | | | |
| | | L329G | | | |
| | | L329K | | | |
| | | A331K | | | |
| Catalytically | ⁴⁰²GCFNF⁴⁰⁶AAAAA | | | C285A | |
| dead | (SEQ ID NOS 297 and 302) | | | | |
| | ⁴⁰²GCFNF⁴⁰⁶YCSTL (Casp-2) | | | D315A-D330A | |
| | (SEQ ID NOS 297 and 305) | | | | |
| | ⁴⁰²GCFNF⁴⁰⁶CIVSM (Casp-3) | | | D330A-Y153A | |
| | (SEQ ID NOS 297 and 306) | | | | |
| | ⁴⁰²GCFNF⁴⁰⁶QPTFT (Casp-8) | | | D330A-Y153F | |
| | (SEQ ID NOS 297 and 307) | | | | |
| | G402A | | | D330A-T317E | |
| | G402I | | | | |
| | G402Q | | | | |
| | G402Y | | | | |
| | C403P | | | | |
| | F404A | | | | |
| | F404S | | | | |
| | F406L | | | | |

### LITERATURE REFERENCES CITED IN EXAMPLES 6-9

[0580] 1. Seifert, R. and K. Wenzel-Seifert, Constitutive activity of G-protein-coupled receptors: cause of disease and common property of wild-type receptors. Naunyn Schmiedebergs Arch Pharmacol, 2002. 366(5): p. 381-416.
[0581] 2. Roose, J. P., et al., T cell receptor-independent basal signaling via Erk and Abl kinases suppresses RAG gene expression. PLoS Biol, 2003. 1(2): p. E53.
[0582] 3. Tze, L. E., et al., Basal immunoglobulin signaling actively maintains developmental stage in immature B cells. PLoS Biol, 2005. 3(3): p. e82.
[0583] 4. Schram, B. R., et al., B cell receptor basal signaling regulates antigen-induced Ig light chain rearrangements. J Immunol, 2008. 180(7): p. 4728-41.
[0584] 5. Randall, K. L., et al., Dock8 mutations cripple B cell immunological synapses, germinal centers and long-lived antibody production. Nat Immunol, 2009. 10(12): p. 1283-91.
[0585] 6. Kouskoff, V., et al., B cell receptor expression level determines the fate of developing B lymphocytes: receptor editing versus selection. Proc Natl Acad Sci USA, 2000. 97(13): p. 7435-9.
[0586] 7. Hong, T., et al., A simple theoretical framework for understanding heterogeneous differentiation of CD4+ T cells. BMC Syst Biol, 2012. 6: p. 66.
[0587] 8. Rudd, M. L., A. Tua-Smith, and D. B. Straus, Lck SH3 domain function is required for T-cell receptor signals regulating thymocyte development. Mol Cell Biol, 2006. 26(21): p. 7892-900.
[0588] 9. Sorkin, A. and M. von Zastrow, Endocytosis and signalling: intertwining molecular networks. Nat Rev Mol Cell Biol, 2009. 10(9): p. 609-22.
[0589] 10. Luning Prak, E. T., M. Monestier, and R. A. Eisenberg, B cell receptor editing in tolerance and autoimmunity. Ann N Y Acad Sci, 2011. 1217: p. 96-121.
[0590] 11. Boss, W. F., et al., Basal signaling regulates plant growth and development. Plant Physiol, 2010. 154(2): p. 439-43.
[0591] 12. Tao, Y. X., Constitutive activation of G protein-coupled receptors and diseases: insights into mechanisms of activation and therapeutics. Pharmacol Ther, 2008. 120(2): p. 129-48.
[0592] 13. Spiegel, A. M., Defects in G protein-coupled signal transduction in human disease. Annu Rev Physiol, 1996. 58: p. 143-70.
[0593] 14. Shiozaki, E. N., et al., Mechanism of XIAP-mediated inhibition of Caspase-9. Mol Cell, 2003. 11(2): p. 519-27.
[0594] 15. Renatus, M., et al., Dimer formation drives the activation of the cell death protease Caspase-9. Proc Natl Acad Sci USA, 2001. 98(25): p. 14250-5.
[0595] 16. Shi, Y., Mechanisms of Caspase activation and inhibition during apoptosis. Mol Cell, 2002. 9(3): p. 459-70.
[0596] 17. Shiozaki, E. N., J. Chai, and Y. Shi, Oligomerization and activation of Caspase-9, induced by Apaf-1 CARD. Proc Natl Acad Sci USA, 2002. 99(7): p. 4197-202.
[0597] 18. Straathof, K. C., et al., An inducible Caspase-9 safety switch for T-cell therapy. Blood, 2005. 105(11): p. 4247-54.
[0598] 19. MacCorkle, R. A., K. W. Freeman, and D. M. Spencer, Synthetic activation of Caspases: artificial death switches. Proc Natl Acad Sci USA, 1998. 95(7): p. 3655-60.
[0599] 20. Di Stasi, A., et al., Inducible apoptosis as a safety switch for adoptive cell therapy. N Engl J Med, 2011. 365(18): p. 1673-83.
[0600] 21. Chang, W. C., et al., Modifying ligand-induced and constitutive signaling of the human 5-HT4 receptor. PLoS One, 2007. 2(12): p. e1317.
[0601] 22. Bloom, J. D. and F. H. Arnold, In the light of directed evolution: pathways of adaptive protein evolution. Proc Natl Acad Sci USA, 2009. 106 Suppl 1: p. 9995-10000.
[0602] 23. Boatright, K. M. and G. S. Salvesen, Mechanisms of Caspase activation. Curr Opin Cell Biol, 2003. 15(6): p. 725-31.
[0603] 24. Boatright, K. M., et al., A unified model for apical Caspase activation. Mol Cell, 2003. 11(2): p. 529-41.
[0604] 25. Chao, Y., et al., Engineering a dimeric Caspase-9: a re-evaluation of the induced proximity model for Caspase activation. PLoS Biol, 2005. 3(6): p. e183.
[0605] 26. Stennicke, H. R., et al., Caspase-9 can be activated without proteolytic processing. J Biol Chem, 1999. 274(13): p. 8359-62.
[0606] 27. Brady, S. C., L. A. Allan, and P. R. Clarke, Regulation of Caspase-9 through phosphorylation by protein kinase C zeta in response to hyperosmotic stress. Mol Cell Biol, 2005. 25(23): p. 10543-55.
[0607] 28. Martin, M. C., et al., Protein kinase A regulates Caspase-9 activation by Apaf-1 downstream of cytochrome c. J Biol Chem, 2005. 280(15): p. 15449-55.
[0608] 29. Cardone, M. H., et al., Regulation of cell death protease Caspase-9 by phosphorylation. Science, 1998. 282(5392): p. 1318-21.
[0609] 30. Raina, D., et al., c-Abl tyrosine kinase regulates Caspase-9 autocleavage in the apoptotic response to DNA damage. J Biol Chem, 2005. 280(12): p. 11147-51.
[0610] 31. Papworth, C., Bauer, J. C., Braman, J. and Wright, D. A., Site-directed mutagenesis in one day with >80% efficiency. Strategies, 1996. 9(3): p. 3-4.
[0611] 32. Spencer, D. M., et al., Functional analysis of Fas signaling in vivo using synthetic inducers of dimerization. Curr Biol, 1996. 6(7): p. 839-47.
[0612] 33. Hsiao, E. C., et al., Constitutive Gs activation using a single-construct tetracycline-inducible expression system in embryonic stem cells and mice. Stem Cell Res Ther, 2011. 2(2): p. 11.
[0613] 34. Waldner, C., et al., Double conditional human embryonic kidney cell line based on FLP and PhiC31 mediated transgene integration. BMC Res Notes, 2011. 4: p. 420.

[0614] The chimeric caspase polypeptides may include amino acid substitutions, including amino acid substitutions that result in a caspase polypeptide with lower basal activity. These may include, for example, iCasp9 D330A, iCasp9 N405Q, and iCasp9 D330A N405Q, demonstrated low to undetectable basal activity, respectively, with a minimum deleterious effect on their AP1903 IC₅₀ in a SEAP reporter-based, surrogate killing assay.

### Example 10

### Examples of Particular Nucleic Acid and Amino Acid Sequences

[0615] The following is nucleotide sequences provide an example of a construct that may be used for expression of the chimeric protein and CD19 marker. The figure presents the SFG.iC9.2A.²CD19.gcs construct

SEQ ID NO: 1, nucleotide sequence of 5′LTR sequence
TGAAAGACCCCACCTGTAGGTTTGGCAAGCTAGCTTAAGTAACGCCATTTTGCAAGGCATGGA
AAAATACATAACTGAGAATAGAAAAGTTCAGATCAAGGTCAGGAACAGATGGAACAGCTGAAT
ATGGGCCAAACAGGATATCTGTGGTAAGCAGTTCCTGCCCCGGCTCAGGGCCAAGAACAGAT
GGAACAGCTGAATATGGGCCAAACAGGATATCTGTGGTAAGCAGTTCCTGCCCCGGCTCAGG
GCCAAGAACAGATGGTCCCCAGATGCGGTCCAGCCCTCAGCAGTTTCTAGAGAACCATCAGA
TGTTTCCAGGGTGCCCCAAGGACCTGAAATGACCCTGTGCCTTATTTGAACTAACCAATCAGT
TCGCTTCTCGCTTCTGTTCGCGCGCTTATGCTCCCCGAGCTCAATAAAAGAGCCCACAACCCC
TCACTCGGGGCGCCAGTCCTCCGATTGACTGAGTCGCCCGGGTACCCGTGTATCCAATAAAC
CCTCTTGCAGTTGCATCCGACTTGTGGTCTCGCTGTTCCTTGGGAGGGTCTCCTCTGAGTGAT
TGACTACCCGTCAGCGGGGGTCTTTCA
SEQ ID NO: 2, nucleotide sequence of Fᵥ (human FKBP12v36)
GGAGTGCAGGTGGAAACCATCTCCCCAGGAGACGGGCGCACCTTCCCCAAGCGCGGCCAGA
CCTGCGTGGTGCACTACACCGGGATGCTTGAAGATGGAAAGAAAGTTGATTCCTCCCGGGAC
AGAAACAAGCCCTTTAAGTTTATGCTAGGCAAGCAGGAGGTGATCCGAGGCTGGGAAGAAGG
GGTTGCCCAGATGAGTGTGGGTCAGAGAGCCAAACTGACTATATCTCCAGATTATGCCTATGG
TGCCACTGGGCACCCAGGCATCATCCCACCACATGCCACTCTCGTCTTCGATGTGGAGCTTC
TAAAACTGGAA
SEQ ID NO: 3 amino acid sequence of Fv (human FKBP12v36)
GVQVETISPGDGRTFPKRGQTCVVHYTGMLEDGKK
VDSSRDRNKPFKFMLGKQEVIRGWEEGVAQMSVGQ
RAKLTISPDYAYGATGHPGIIPPHATLVFDVELLKLE
SEQ ID NO: 4, GS linker (SEQ ID NO: 151) nucleotide sequence
TCTGGCGGTGGATCCGGA
SEQ ID NO: 5, GS linker (SEQ ID NO: 151) amino acid sequence
SGGGSG
SEQ ID NO: 6, linker nucleotide sequence (between GS linker
(SEQ ID NO: 151) and Casp 9)
GTCGAC
SEQ ID NO: 7, linker amino acid sequence (between GS linker
(SEQ ID NO: 151) and Casp 9)
VD
SEQ ID NO: 8, Casp 9 (truncated) nucleotide sequence
GGATTTGGTGATGTCGGTGCTCTTGAGAGTTTGAGGGGAAATGCAGATTTGGCTTACATCCTG
AGCATGGAGCCCTGTGGCCACTGCCTCATTATCAACAATGTGAACTTCTGCCGTGAGTCCGG
GCTCCGCACCCGCACTGGCTCCAACATCGACTGTGAGAAGTTGCGGCGTCGCTTCTCCTCGC
TGCATTTCATGGTGGAGGTGAAGGGCGACCTGACTGCCAAGAAAATGGTGCTGGCTTTGCTG
GAGCTGGCGCAGCAGGACCACGGTGCTCTGGACTGCTGCGTGGTGGTCATTCTCTCTCACG
GCTGTCAGGCCAGCCACCTGCAGTTCCCAGGGGCTGTCTACGGCACAGATGGATGCCCTGT
GTCGGTCGAGAAGATTGTGAACATCTTCAATGGGACCAGCTGCCCCAGCCTGGGAGGGAAG
CCCAAGCTCTTTTTCATCCAGGCCTGTGGTGGGGAGCAGAAAGACCATGGGTTTGAGGTGGC
CTCCACTTCCCCTGAAGACGAGTCCCCTGGCAGTAACCCCGAGCCAGATGCCACCCCGTTCC
AGGAAGGTTTGAGGACCTTCGACCAGCTGGACGCCATATCTAGTTTGCCCACACCCAGTGAC
ATCTTTGTGTCCTACTCTACTTTCCCAGGTTTTGTTTCCTGGAGGGACCCCAAGAGTGGCTCC
TGGTACGTTGAGACCCTGGACGACATCTTTGAGCAGTGGGCTCACTCTGAAGACCTGCAGTC
CCTCCTGCTTAGGGTCGCTAATGCTGTTTCGGTGAAAGGGATTTATAAACAGATGCCTGGTTG
CTTTAATTTCCTCCGGAAAAAACTTTTCTTTAAAACATCA
SEQ ID NO: 9, Caspase-9 (truncated) amino acid sequence-CARD
domain deleted
GFGDVGALESLRGNADLAYILSMEPCGHCLIINNVN
FCRESGLRTRTGSNIDCEKLRRRFSSLHFMVEVKGD
LTAKKMVLALLELAQQDHGALDCCVVVILSHGCQAS
HLQFPGAVYGTDGCPVSVEKIVNIFNGTSCPSLGGK
PKLFFIQACGGEQKDHGFEVASTSPEDESPGSNPEP
DATPFQEGLRTFDQLDAISSLPTPSDIFVSYSTFPGF
VSWRDPKSGSWYVETLDDIFEQWAHSEDLQSLLLR
VANAVSVKGIYKQMPGCFNFLRKKLFFKTS
SEQ ID NO: 10, linker nucleotide sequence (between Caspase-9 and 2A)
GCTAGCAGA
SEQ ID NO: 11, linker amino acid sequence (between Caspase-9 and 2A)
ASR
SEQ ID NO: 12, Thosea asigna virus-2A from capsid protein precursor
nucleotide sequence
GCCGAGGGCAGGGGAAGTCTTCTAACATGCGGGGACGTGGAGGAAAATCCCGGGCCC
SEQ ID NO: 13, Thosea asigna virus-2A from capsid protein precursor amino
acid sequence
AEGRGSLLTCGDVEENPGP
SEQ ID NO: 14, human CD19 (4 cytoplasmic domain) nucleotide sequence
(transmembrane domain in bold)
ATGCCACCTCCTCGCCTCCTCTTCTTCCTCCTCTTCCTCACCCCCATGGAAGTCAGGCCCGAG
GAACCTCTAGTGGTGAAGGTGGAAGAGGGAGATAACGCTGTGCTGCAGTGCCTCAAGGGGA
CCTCAGATGGCCCCACTCAGCAGCTGACCTGGTCTCGGGAGTCCCCGCTTAAACCCTTCTTA
AAACTCAGCCTGGGGCTGCCAGGCCTGGGAATCCACATGAGGCCCCTGGCCATCTGGCTTTT
CATCTTCAACGTCTCTCAACAGATGGGGGGCTTCTACCTGTGCCAGCCGGGGCCCCCCTCTG
AGAAGGCCTGGCAGCCTGGCTGGACAGTCAATGTGGAGGGCAGCGGGGAGCTGTTCCGGTG
GAATGTTTCGGACCTAGGTGGCCTGGGCTGTGGCCTGAAGAACAGGTCCTCAGAGGGCCCC
AGCTCCCCTTCCGGGAAGCTCATGAGCCCCAAGCTGTATGTGTGGGCCAAAGACCGCCCTGA
GATCTGGGAGGGAGAGCCTCCGTGTCTCCCACCGAGGGACAGCCTGAACCAGAGCCTCAGC
CAGGACCTCACCATGGCCCCTGGCTCCACACTCTGGCTGTCCTGTGGGGTACCCCCTGACTC
TGTGTCCAGGGGCCCCCTCTCCTGGACCCATGTGCACCCCAAGGGGCCTAAGTCATTGCTGA
GCCTAGAGCTGAAGGACGATCGCCCGGCCAGAGATATGTGGGTAATGGAGACGGGTCTGTT
GTTGCCCCGGGCCACAGCTCAAGACGCTGGAAAGTATTATTGTCACCGTGGCAACCTGACCA
TGTCATTCCACCTGGAGATCACTGCTCGGCCAGTACTATGGCACTGGCTGCTGAGGACTGGT
GGCTGGAAGGTCTCAGCTGTGACTTTGGCTTATCTGATCTTCTGCCTGTGTTCCCTTGTGGG
CATTCTTCATCTTCAAAGAGCCCTGGTCCTGAGGAGGAAAAGAAAGCGAATGACTGACCCCA
CCAGGAGATTC
SEQ ID NO: 15, human CD19 (Δ cytoplasmic domain) amino acid sequence
MPPPRLLFFLLFLTPMEVRPEEPLVVKVEEGDNAVL
QCLKGTSDGPTQQLTWSRESPLKPFLKLSLGLPGLG
IHMRPLAIWLFIFNVSQQMGGFYLCQPGPPSEKAWQ
PGWTVNVEGSGELFRWNVSDLGGLGCGLKNRSSEG
PSSPSGKLMSPKLYVWAKDRPEIWEGEPPCLPPRD
SLNQSLSQDLTMAPGSTLWLSCGVPPDSVSRGPLS
WTHVHPKGPKSLLSLELKDDRPARDMWVMETGLLL
PRATAQDAGKYYCHRGNLTMSFHLEITARPVLWHW
LLRTGGWKVSAVTLAYLIFCLCSLVGILHLQRALVLR
RKRKRMTDPTRRF
SEQ ID NO: 16, 3′LTR nucleotide sequence
TGAAAGACCCCACCTGTAGGTTTGGCAAGCTAGCTTAAGTAACGCCATTTTGCAAGGCATGGA
AAAATACATAACTGAGAATAGAGAAGTTCAGATCAAGGTCAGGAACAGATGGAACAGCTGAAT
ATGGGCCAAACAGGATATCTGTGGTAAGCAGTTCCTGCCCCGGCTCAGGGCCAAGAACAGAT
GGAACAGCTGAATATGGGCCAAACAGGATATCTGTGGTAAGCAGTTCCTGCCCCGGCTCAGG
GCCAAGAACAGATGGTCCCCAGATGCGGTCCAGCCCTCAGCAGTTTCTAGAGAACCATCAGA
TGTTTCCAGGGTGCCCCAAGGACCTGAAATGACCCTGTGCCTTATTTGAACTAACCAATCAGT
TCGCTTCTCGCTTCTGTTCGCGCGCTTCTGCTCCCCGAGCTCAATAAAAGAGCCCACAACCCC
TCACTCGGGGCGCCAGTCCTCCGATTGACTGAGTCGCCCGGGTACCCGTGTATCCAATAAAC
CCTCTTGCAGTTGCATCCGACTTGTGGTCTCGCTGTTCCTTGGGAGGGTCTCCTCTGAGTGAT
TGACTACCCGTCAGCGGGGGTCTTTCA
SEQ ID NO: 17, Expression vector construct nucleotide sequence-
nucleotide sequence coding for the chimeric protein and 5′ and
3′ LTR sequences, and additional vector sequence.
TGAAAGACCCCACCTGTAGGTTTGGCAAGCTAGCTTAAGTAACGCCATTTTGCAAGGCATGGA
AAAATACATAACTGAGAATAGAAAAGTTCAGATCAAGGTCAGGAACAGATGGAACAGCTGAAT
ATGGGCCAAACAGGATATCTGTGGTAAGCAGTTCCTGCCCCGGCTCAGGGCCAAGAACAGAT
GGAACAGCTGAATATGGGCCAAACAGGATATCTGTGGTAAGCAGTTCCTGCCCCGGCTCAGG
GCCAAGAACAGATGGTCCCCAGATGCGGTCCAGCCCTCAGCAGTTTCTAGAGAACCATCAGA
TGTTTCCAGGGTGCCCCAAGGACCTGAAATGACCCTGTGCCTTATTTGAACTAACCAATCAGT
TCGCTTCTCGCTTCTGTTCGCGCGCTTATGCTCCCCGAGCTCAATAAAAGAGCCCACAACCCC
TCACTCGGGGCGCCAGTCCTCCGATTGACTGAGTCGCCCGGGTACCCGTGTATCCAATAAAC
CCTCTTGCAGTTGCATCCGACTTGTGGTCTCGCTGTTCCTTGGGAGGGTCTCCTCTGAGTGAT
TGACTACCCGTCAGCGGGGGTCTTTCATTTGGGGGCTCGTCCGGGATCGGGAGACCCCTGC
CCAGGGACCACCGACCCACCACCGGGAGGTAAGCTGGCCAGCAACTTATCTGTGTCTGTCC
GATTGTCTAGTGTCTATGACTGATTTTATGCGCCTGCGTCGGTACTAGTTAGCTAACTAGCTCT
GTATCTGGCGGACCCGTGGTGGAACTGACGAGTTCGGAACACCCGGCCGCAACCCTGGGAG
ACGTCCCAGGGACTTCGGGGGCCGTTTTTGTGGCCCGACCTGAGTCCTAAAATCCCGATCGT
TTAGGACTCTTTGGTGCACCCCCCTTAGAGGAGGGATATGTGGTTCTGGTAGGAGACGAGAA
CCTAAAACAGTTCCCGCCTCCGTCTGAATTTTTGCTTTCGGTTTGGGACCGAAGCCGCGCCG
CGCGTCTTGTCTGCTGCAGCATCGTTCTGTGTTGTCTCTGTCTGACTGTGTTTCTGTATTTGTC
TGAAAATATGGGCCCGGGCTAGCCTGTTACCACTCCCTTAAGTTTGACCTTAGGTCACTGGAA
AGATGTCGAGCGGATCGCTCACAACCAGTCGGTAGATGTCAAGAAGAGACGTTGGGTTACCT
TCTGCTCTGCAGAATGGCCAACCTTTAACGTCGGATGGCCGCGAGACGGCACCTTTAACCGA
GACCTCATCACCCAGGTTAAGATCAAGGTCTTTTCACCTGGCCCGCATGGACACCCAGACCA
GGTGGGGTACATCGTGACCTGGGAAGCCTTGGCTTTTGACCCCCCTCCCTGGGTCAAGCCCT
TTGTACACCCTAAGCCTCCGCCTCCTCTTCCTCCATCCGCCCCGTCTCTCCCCCTTGAACCTC
CTCGTTCGACCCCGCCTCGATCCTCCCTTTATCCAGCCCTCACTCCTTCTCTAGGCGCCCCCA
TATGGCCATATGAGATCTTATATGGGGCACCCCCGCCCCTTGTAAACTTCCCTGACCCTGACA
TGACAAGAGTTACTAACAGCCCCTCTCTCCAAGCTCACTTACAGGCTCTCTACTTAGTCCAGC
ACGAAGTCTGGAGACCTCTGGCGGCAGCCTACCAAGAACAACTGGACCGACCGGTGGTACC
TCACCCTTACCGAGTCGGCGACACAGTGTGGGTCCGCCGACACCAGACTAAGAACCTAGAAC
CTCGCTGGAAAGGACCTTACACAGTCCTGCTGACCACCCCCACCGCCCTCAAAGTAGACGGC
ATCGCAGCTTGGATACACGCCGCCCACGTGAAGGCTGCCGACCCCGGGGGTGGACCATCCT
CTAGACTGCCATGCTCGAGGGAGTGCAGGTGGAAACCATCTCCCCAGGAGACGGGCGCACC
TTCCCCAAGCGCGGCCAGACCTGCGTGGTGCACTACACCGGGATGCTTGAAGATGGAAAGAA
AGTTGATTCCTCCCGGGACAGAAACAAGCCCTTTAAGTTTATGCTAGGCAAGCAGGAGGTGAT
CCGAGGCTGGGAAGAAGGGGTTGCCCAGATGAGTGTGGGTCAGAGAGCCAAACTGACTATA
TCTCCAGATTATGCCTATGGTGCCACTGGGCACCCAGGCATCATCCCACCACATGCCACTCTC
GTCTTCGATGTGGAGCTTCTAAAACTGGAATCTGGCGGTGGATCCGGAGTCGACGGATTTGG
TGATGTCGGTGCTCTTGAGAGTTTGAGGGGAAATGCAGATTTGGCTTACATCCTGAGCATGGA
GCCCTGTGGCCACTGCCTCATTATCAACAATGTGAACTTCTGCCGTGAGTCCGGGCTCCGCA
CCCGCACTGGCTCCAACATCGACTGTGAGAAGTTGCGGCGTCGCTTCTCCTCGCTGCATTTC
ATGGTGGAGGTGAAGGGCGACCTGACTGCCAAGAAAATGGTGCTGGCTTTGCTGGAGCTGG
CGCAGCAGGACCACGGTGCTCTGGACTGCTGCGTGGTGGTCATTCTCTCTCACGGCTGTCAG
GCCAGCCACCTGCAGTTCCCAGGGGCTGTCTACGGCACAGATGGATGCCCTGTGTCGGTCG
AGAAGATTGTGAACATCTTCAATGGGACCAGCTGCCCCAGCCTGGGAGGGAAGCCCAAGCTC
TTTTTCATCCAGGCCTGTGGTGGGGAGCAGAAAGACCATGGGTTTGAGGTGGCCTCCACTTC
CCCTGAAGACGAGTCCCCTGGCAGTAACCCCGAGCCAGATGCCACCCCGTTCCAGGAAGGT
TTGAGGACCTTCGACCAGCTGGACGCCATATCTAGTTTGCCCACACCCAGTGACATCTTTGTG
TCCTACTCTACTTTCCCAGGTTTTGTTTCCTGGAGGGACCCCAAGAGTGGCTCCTGGTACGTT
GAGACCCTGGACGACATCTTTGAGCAGTGGGCTCACTCTGAAGACCTGCAGTCCCTCCTGCT
TAGGGTCGCTAATGCTGTTTCGGTGAAAGGGATTTATAAACAGATGCCTGGTTGCTTTAATTTC
CTCCGGAAAAAACTTTTCTTTAAAACATCAGCTAGCAGAGCCGAGGGCAGGGGAAGTCTTCTA
ACATGCGGGGACGTGGAGGAAAATCCCGGGCCCATGCCACCTCCTCGCCTCCTCTTCTTCCT
CCTCTTCCTCACCCCCATGGAAGTCAGGCCCGAGGAACCTCTAGTGGTGAAGGTGGAAGAGG
GAGATAACGCTGTGCTGCAGTGCCTCAAGGGGACCTCAGATGGCCCCACTCAGCAGCTGAC
CTGGTCTCGGGAGTCCCCGCTTAAACCCTTCTTAAAACTCAGCCTGGGGCTGCCAGGCCTGG
GAATCCACATGAGGCCCCTGGCCATCTGGCTTTTCATCTTCAACGTCTCTCAACAGATGGGGG
GCTTCTACCTGTGCCAGCCGGGGCCCCCCTCTGAGAAGGCCTGGCAGCCTGGCTGGACAGT
CAATGTGGAGGGCAGCGGGGAGCTGTTCCGGTGGAATGTTTCGGACCTAGGTGGCCTGGGC
TGTGGCCTGAAGAACAGGTCCTCAGAGGGCCCCAGCTCCCCTTCCGGGAAGCTCATGAGCC
CCAAGCTGTATGTGTGGGCCAAAGACCGCCCTGAGATCTGGGAGGGAGAGCCTCCGTGTCT
CCCACCGAGGGACAGCCTGAACCAGAGCCTCAGCCAGGACCTCACCATGGCCCCTGGCTCC
ACACTCTGGCTGTCCTGTGGGGTACCCCCTGACTCTGTGTCCAGGGGCCCCCTCTCCTGGAC
CCATGTGCACCCCAAGGGGCCTAAGTCATTGCTGAGCCTAGAGCTGAAGGACGATCGCCCG
GCCAGAGATATGTGGGTAATGGAGACGGGTCTGTTGTTGCCCCGGGCCACAGCTCAAGACG
CTGGAAAGTATTATTGTCACCGTGGCAACCTGACCATGTCATTCCACCTGGAGATCACTGCTC
GGCCAGTACTATGGCACTGGCTGCTGAGGACTGGTGGCTGGAAGGTCTCAGCTGTGACTTTG
GCTTATCTGATCTTCTGCCTGTGTTCCCTTGTGGGCATTCTTCATCTTCAAAGAGCCCTGGTCC
TGAGGAGGAAAAGAAAGCGAATGACTGACCCCACCAGGAGATTCTAACGCGTCATCATCGAT
CCGGATTAGTCCAATTTGTTAAAGACAGGATATCAGTGGTCCAGGCTCTAGTTTTGACTCAAC
AATATCACCAGCTGAAGCCTATAGAGTACGAGCCATAGATAAAATAAAAGATTTTATTTAGTCT
CCAGAAAAAGGGGGGAATGAAAGACCCCACCTGTAGGTTTGGCAAGCTAGCTTAAGTAACGC
CATTTTGCAAGGCATGGAAAAATACATAACTGAGAATAGAGAAGTTCAGATCAAGGTCAGGAA
CAGATGGAACAGCTGAATATGGGCCAAACAGGATATCTGTGGTAAGCAGTTCCTGCCCCGGC
TCAGGGCCAAGAACAGATGGAACAGCTGAATATGGGCCAAACAGGATATCTGTGGTAAGCAG
TTCCTGCCCCGGCTCAGGGCCAAGAACAGATGGTCCCCAGATGCGGTCCAGCCCTCAGCAG
TTTCTAGAGAACCATCAGATGTTTCCAGGGTGCCCCAAGGACCTGAAATGACCCTGTGCCTTA
TTTGAACTAACCAATCAGTTCGCTTCTCGCTTCTGTTCGCGCGCTTCTGCTCCCCGAGCTCAA
TAAAAGAGCCCACAACCCCTCACTCGGGGCGCCAGTCCTCCGATTGACTGAGTCGCCCGGGT
ACCCGTGTATCCAATAAACCCTCTTGCAGTTGCATCCGACTTGTGGTCTCGCTGTTCCTTGGG
AGGGTCTCCTCTGAGTGATTGACTACCCGTCAGCGGGGGTCTTTCACACATGCAGCATGTAT
CAAAATTAATTTGGTTTTTTTTCTTAAGTATTTACATTAAATGGCCATAGTACTTAAAGTTACATT
GGCTTCCTTGAAATAAACATGGAGTATTCAGAATGTGTCATAAATATTTCTAATTTTAAGATAGT
ATCTCCATTGGCTTTCTACTTTTTCTTTTATTTTTTTTTGTCCTCTGTCTTCCATTTGTTGTTGTT
GTTGTTTGTTTGTTTGTTTGTTGGTTGGTTGGTTAATTTTTTTTTAAAGATCCTACACTATAGTTC
AAGCTAGACTATTAGCTACTCTGTAACCCAGGGTGACCTTGAAGTCATGGGTAGCCTGCTGTT
TTAGCCTTCCCACATCTAAGATTACAGGTATGAGCTATCATTTTTGGTATATTGATTGATTGATT
GATTGATGTGTGTGTGTGTGATTGTGTTTGTGTGTGTGACTGTGAAAATGTGTGTATGGGTGT
GTGTGAATGTGTGTATGTATGTGTGTGTGTGAGTGTGTGTGTGTGTGTGTGCATGTGTGTGTG
TGTGACTGTGTCTATGTGTATGACTGTGTGTGTGTGTGTGTGTGTGTGTGTGTGTGTGTGTGT
GTGTGTGTTGTGAAAAAATATTCTATGGTAGTGAGAGCCAACGCTCCGGCTCAGGTGTCAGGT
TGGTTTTTGAGACAGAGTCTTTCACTTAGCTTGGAATTCACTGGCCGTCGTTTTACAACGTCGT
GACTGGGAAAACCCTGGCGTTACCCAACTTAATCGCCTTGCAGCACATCCCCCTTTCGCCAG
CTGGCGTAATAGCGAAGAGGCCCGCACCGATCGCCCTTCCCAACAGTTGCGCAGCCTGAATG
GCGAATGGCGCCTGATGCGGTATTTTCTCCTTACGCATCTGTGCGGTATTTCACACCGCATAT
GGTGCACTCTCAGTACAATCTGCTCTGATGCCGCATAGTTAAGCCAGCCCCGACACCCGCCA
ACACCCGCTGACGCGCCCTGACGGGCTTGTCTGCTCCCGGCATCCGCTTACAGACAAGCTGT
GACCGTCTCCGGGAGCTGCATGTGTCAGAGGTTTTCACCGTCATCACCGAAACGCGCGATGA
CGAAAGGGCCTCGTGATACGCCTATTTTTATAGGTTAATGTCATGATAATAATGGTTTCTTAGA
CGTCAGGTGGCACTTTTCGGGGAAATGTGCGCGGAACCCCTATTTGTTTATTTTTCTAAATACA
TTCAAATATGTATCCGCTCATGAGACAATAACCCTGATAAATGCTTCAATAATATTGAAAAAGG
AAGAGTATGAGTATTCAACATTTCCGTGTCGCCCTTATTCCCTTTTTTGCGGCATTTTGCCTTC
CTGTTTTTGCTCACCCAGAAACGCTGGTGAAAGTAAAAGATGCTGAAGATCAGTTGGGTGCAC
GAGTGGGTTACATCGAACTGGATCTCAACAGCGGTAAGATCCTTGAGAGTTTTCGCCCCGAA
GAACGTTTTCCAATGATGAGCACTTTTAAAGTTCTGCTATGTGGCGCGGTATTATCCCGTATTG
ACGCCGGGCAAGAGCAACTCGGTCGCCGCATACACTATTCTCAGAATGACTTGGTTGAGTAC
TCACCAGTCACAGAAAAGCATCTTACGGATGGCATGACAGTAAGAGAATTATGCAGTGCTGCC
ATAACCATGAGTGATAACACTGCGGCCAACTTACTTCTGACAACGATCGGAGGACCGAAGGA
GCTAACCGCTTTTTTGCACAACATGGGGGATCATGTAACTCGCCTTGATCGTTGGGAACCGGA
GCTGAATGAAGCCATACCAAACGACGAGCGTGACACCACGATGCCTGTAGCAATGGCAACAA
CGTTGCGCAAACTATTAACTGGCGAACTACTTACTCTAGCTTCCCGGCAACAATTAATAGACT
GGATGGAGGCGGATAAAGTTGCAGGACCACTTCTGCGCTCGGCCCTTCCGGCTGGCTGGTTT
ATTGCTGATAAATCTGGAGCCGGTGAGCGTGGGTCTCGCGGTATCATTGCAGCACTGGGGCC
AGATGGTAAGCCCTCCCGTATCGTAGTTATCTACACGACGGGGAGTCAGGCAACTATGGATG
AACGAAATAGACAGATCGCTGAGATAGGTGCCTCACTGATTAAGCATTGGTAACTGTCAGACC
AAGTTTACTCATATATACTTTAGATTGATTTAAAACTTCATTTTTAATTTAAAAGGATCTAGGTGA
AGATCCTTTTTGATAATCTCATGACCAAAATCCCTTAACGTGAGTTTTCGTTCCACTGAGCGTC
AGACCCCGTAGAAAAGATCAAAGGATCTTCTTGAGATCCTTTTTTTCTGCGCGTAATCTGCTGC
TTGCAAACAAAAAAACCACCGCTACCAGCGGTGGTTTGTTTGCCGGATCAAGAGCTACCAACT
CTTTTTCCGAAGGTAACTGGCTTCAGCAGAGCGCAGATACCAAATACTGTCCTTCTAGTGTAG
CCGTAGTTAGGCCACCACTTCAAGAACTCTGTAGCACCGCCTACATACCTCGCTCTGCTAATC
CTGTTACCAGTGGCTGCTGCCAGTGGCGATAAGTCGTGTCTTACCGGGTTGGACTCAAGACG
ATAGTTACCGGATAAGGCGCAGCGGTCGGGCTGAACGGGGGGTTCGTGCACACAGCCCAGC
TTGGAGCGAACGACCTACACCGAACTGAGATACCTACAGCGTGAGCATTGAGAAAGCGCCAC
GCTTCCCGAAGGGAGAAAGGCGGACAGGTATCCGGTAAGCGGCAGGGTCGGAACAGGAGA
GCGCACGAGGGAGCTTCCAGGGGGAAACGCCTGGTATCTTTATAGTCCTGTCGGGTTTCGCC
ACCTCTGACTTGAGCGTCGATTTTTGTGATGCTCGTCAGGGGGGCGGAGCCTATGGAAAAAC
GCCAGCAACGCGGCCTTTTTACGGTTCCTGGCCTTTTGCTGGCCTTTTGCTCACATGTTCTTT
CCTGCGTTATCCCCTGATTCTGTGGATAACCGTATTACCGCCTTTGAGTGAGCTGATACCGCT
CGCCGCAGCCGAACGACCGAGCGCAGCGAGTCAGTGAGCGAGGAAGCGGAAGAGCGCCCA
ATACGCAAACCGCCTCTCCCCGCGCGTTGGCCGATTCATTAATGCAGCTGGCACGACAGGTT
TCCCGACTGGAAAGCGGGCAGTGAGCGCAACGCAATTAATGTGAGTTAGCTCACTCATTAGG
CACCCCAGGCTTTACACTTTATGCTTCCGGCTCGTATGTTGTGTGGAATTGTGAGCGGATAAC
AATTTCACACAGGAAACAGCTATGACCATGATTACGCCAAGCTTTGCTCTTAGGAGTTTCCTAA
TACATCCCAAACTCAAATATATAAAGCATTTGACTTGTTCTATGCCCTAGGGGGCGGGGGGAA
GCTAAGCCAGCTTTTTTTAACATTTAAAATGTTAATTCCATTTTAAATGCACAGATGTTTTTATTT
CATAAGGGTTTCAATGTGCATGAATGCTGCAATATTCCTGTTACCAAAGCTAGTATAAATAAAA
ATAGATAAACGTGGAAATTACTTAGAGTTTCTGTCATTAACGTTTCCTTCCTCAGTTGACAACAT
AAATGCGCTGCTGAGCAAGCCAGTTTGCATCTGTCAGGATCAATTTCCCATTATGCCAGTCAT
ATTAATTACTAGTCAATTAGTTGATTTTTATTTTTGACATATACATGTGAA
SEQ ID NO: 18, (nucleotide sequence of Fᵥ,Fᵥₗₛ with XhoI/SalI linkers,
(wobbled codons lowercase in Fᵥ,))
ctcgagGGcGTcCAaGTcGAaACcATtagtCCcGGcGAtGGcaGaACaTTtCCtAAaaGgGGaCAaACaTGt
GTcGTcCAtTAtACaGGcATGtTgGAgGAcGGcAAaAAgGTgGAcagtagtaGaGAtcGcAAtAAaCCtTTc
AAaTTcATGtTgGGaAAaCAaGAaGTcATtaGgGGaTGGGAgGAgGGcGTgGCtCAaATGtccGTcGGc
CAacGcGCtAAgCTcACcATcagcCCcGAcTAcGCaTAcGGcGCtACcGGaCAtCCcGGaATtATtCCcC
CtCAcGCtACctTgGTgTTtGAcGTcGAaCTgtTgAAgCTcGAagtcgagggagtgcaggtggaaaccatct
ccccaggagacgggcgcaccttccccaagcgcggccagacctgcgtggtgcactacaccgggatgcttgaag
atggaaagaaagttgattcctcccgggacagaaacaagccctttaagtttatgctaggcaagcaggaggtga
tccgaggctgggaagaaggggttgcccagatgagtgtgggtcagagagccaaactgactatatctccagatta
tgcctatggtgccactgggcacccaggcatcatcccaccacatgccactctcgtcttcgatgtggagcttcta
aaactggaatctggcggtggatccggagtcgag
SEQ ID NO: 19, (FvFvLs amino acid sequence)
GlyValGlnValGluThrIleSerProGlyAspGlyArgThrPheProLysArgGlyGlnThrCysValValHis
TyrThrGlyMetLeuGluAspGlyLysLysValAspSerSerArgAspArgAsnLysProPheLysPheMetLeu
GlyLysGlnGluValIleArgGlyTrpGluGluGlyValAlaGlnMetSerValGlyGlnArgAlaLysLeuThr
IleSerProAspTyrAlaTyrGlyAlaThrGlyHisProGlyIleIleProProHisAlaThrLeuValPheAsp
ValGluLeuLeuLysLeuGlu(ValGlu)GlyValGlnValGluThrIleSerProGlyAspGlyArgThrPhe
ProLysArgGlyGlnThrCysValValHisTyrThrGlyMetLeuGluAspGlyLysLysValAspSerSerArg
AspArgAsnLysProPheLysPheMetLeuGlyLysGlnGluValIleArgGlyTrpGluGluGlyValAlaGln
MetSerValGlyGlnArgAlaLysLeuThrIleSerProAspTyrAlaTyrGlyAlaThrGlyHisProGlyIle
IleProProHisAlaThrLeuValPheAspValGluLeuLeuLysLeuGlu-SerGlyGlyGlySerGly
SEQ ID NO: 20, FKBP12v36 (res. 2-108)
SGGGSG Linker (6 aa) (SEQ ID NO: 289)
ΔCasp9 (res. 135-416)
ATGCTCGAGGGAGTGCAGGTGGAgACtATCTCCCCAGGAGACGGGCGCACCTTCCCCAAGCG
CGGCCAGACCTGCGTGGTGCACTACACCGGGATGCTTGAAGATGGAAAGAAAGTTGATTCCT
CCCGGGACAGAAACAAGCCCTTTAAGTTTATGCTAGGCAAGCAGGAGGTGATCCGAGGCTGG
GAAGAAGGGGTTGCCCAGATGAGTGTGGGTCAGAGAGCCAAACTGACTATATCTCCAGATTA
TGCCTATGGTGCCACTGGGCACCCAGGCATCATCCCACCACATGCCACTCTCGTCTTCGATG
TGGAGCTTCTAAAACTGGAATCTGGCGGTGGATCCGGAGTCGACGGATTTGGTGATGTCGGT
GCTCTTGAGAGTTTGAGGGGAAATGCAGATTTGGCTTACATCCTGAGCATGGAGCCCTGTGG
CCACTGCCTCATTATCAACAATGTGAACTTCTGCCGTGAGTCCGGGCTCCGCACCCGCACTG
GCTCCAACATCGACTGTGAGAAGTTGCGGCGTCGCTTCTCCTCGCTGCATTTCATGGTGGAG
GTGAAGGGCGACCTGACTGCCAAGAAAATGGTGCTGGCTTTGCTGGAGCTGGCGCgGCAGG
ACCACGGTGCTCTGGACTGCTGCGTGGTGGTCATTCTCTCTCACGGCTGTCAGGCCAGCCAC
CTGCAGTTCCCAGGGGCTGTCTACGGCACAGATGGATGCCCTGTGTCGGTCGAGAAGATTGT
GAACATCTTCAATGGGACCAGCTGCCCCAGCCTGGGAGGGAAGCCCAAGCTCTTTTTCATCC
AGGCCTGTGGTGGGGAGCAGAAAGACCATGGGTTTGAGGTGGCCTCCACTTCCCCTGAAGA
CGAGTCCCCTGGCAGTAACCCCGAGCCAGATGCCACCCCGTTCCAGGAAGGTTTGAGGACC
TTCGACCAGCTGGACGCCATATCTAGTTTGCCCACACCCAGTGACATCTTTGTGTCCTACTCT
ACTTTCCCAGGTTTTGTTTCCTGGAGGGACCCCAAGAGTGGCTCCTGGTACGTTGAGACCCT
GGACGACATCTTTGAGCAGTGGGCTCACTCTGAAGACCTGCAGTCCCTCCTGCTTAGGGTCG
CTAATGCTGTTTCGGTGAAAGGGATTTATAAACAGATGCCTGGTTGCTTTAATTTCCTCCGGAA
AAAACTTTTCTTTAAAACATCA
SEQ ID NO: 21, FKBP12v36 (res. 2-108)
GVQVETISPGDGRTFPKRGQTCVVHYTGMLEDGKK
VDSSRDRNKPFKFMLGKQEVIRGWEEGVAQMSVGQ
RAKLTISPDYAYGATGHPGIIPPHATLVFDVELLKLE
SEQ ID NO: 22, ΔCasp9 (res. 135-416)
GFGDVGALESLRGNADLAYILSMEPCGHCLIINNVN
FCRESGLRTRTGSNIDCEKLRRRFSSLHFMVEVKGD
LTAKKMVLALLELARQDHGALDCCVVVILSHGCQAS
HLQFPGAVYGTDGCPVSVEKIVNIFNGTSCPSLGGK
PKLFFIQACGGEQKDHGFEVASTSPEDESPGSNPEP
DATPFQEGLRTFDQLDAISSLPTPSDIFVSYSTFPGF
VSWRDPKSGSWYVETLDDIFEQWAHSEDLQSLLLR
VANAVSVKGIYKQMPGCFNFLRKKLFFKTS
SEQ ID NO: 23, ΔCasp9 (res. 135-416) D330A, nucleotide sequence
GGATTTGGTGATGTCGGTGCTCTTGAGAGTTTGAGGGGAAATGCAGATTTGGCTTACATCCTG
AGCATGGAGCCCTGTGGCCACTGCCTCATTATCAACAATGTGAACTTCTGCCGTGAGTCCGG
GCTCCGCACCCGCACTGGCTCCAACATCGACTGTGAGAAGTTGCGGCGTCGCTTCTCCTCGC
TGCATTTCATGGTGGAGGTGAAGGGCGACCTGACTGCCAAGAAAATGGTGCTGGCTTTGCTG
GAGCTGGCGCgGCAGGACCACGGTGCTCTGGACTGCTGCGTGGTGGTCATTCTCTCTCACG
GCTGTCAGGCCAGCCACCTGCAGTTCCCAGGGGCTGTCTACGGCACAGATGGATGCCCTGT
GTCGGTCGAGAAGATTGTGAACATCTTCAATGGGACCAGCTGCCCCAGCCTGGGAGGGAAG
CCCAAGCTCTTTTTCATCCAGGCCTGTGGTGGGGAGCAGAAAGACCATGGGTTTGAGGTGGC
CTCCACTTCCCCTGAAGACGAGTCCCCTGGCAGTAACCCCGAGCCAGATGCCACCCCGTTCC
AGGAAGGTTTGAGGACCTTCGACCAGCTGGCCGCCATATCTAGTTTGCCCACACCCAGTGAC
ATCTTTGTGTCCTACTCTACTTTCCCAGGTTTTGTTTCCTGGAGGGACCCCAAGAGTGGCTCC
TGGTACGTTGAGACCCTGGACGACATCTTTGAGCAGTGGGCTCACTCTGAAGACCTGCAGTC
CCTCCTGCTTAGGGTCGCTAATGCTGTTTCGGTGAAAGGGATTTATAAACAGATGCCTGGTTG
CTTTAATTTCCTCCGGAAAAAACTTTTCTTTAAAACATCA
SEQ ID NO: 24, ΔCasp9 (res. 135-416) D330A, amino acid sequence
GFGDVGALESLRGNADLAYILSMEPCGHCLIINNVN
FCRESGLRTRTGSNIDCEKLRRRFSSLHFMVEVKGD
LTAKKMVLALLELARQDHGALDCCVVVILSHGCQAS
HLQFPGAVYGTDGCPVSVEKIVNIFNGTSCPSLGGK
PKLFFIQACGGEQKDHGFEVASTSPEDESPGSNPEP
DATPFQEGLRTFDQLAAISSLPTPSDIFVSYSTFPGF
VSWRDPKSGSWYVETLDDIFEQWAHSEDLQSLLLR
VANAVSVKGIYKQMPGCFNFLRKKLFFKTS
SEQ ID NO: 25, ΔCasp9 (res. 135-416) N405Q nucleotide sequence
GGATTTGGTGATGTCGGTGCTCTTGAGAGTTTGAGGGGAAATGCAGATTTGGCTTACATCCTG
AGCATGGAGCCCTGTGGCCACTGCCTCATTATCAACAATGTGAACTTCTGCCGTGAGTCCGG
GCTCCGCACCCGCACTGGCTCCAACATCGACTGTGAGAAGTTGCGGCGTCGCTTCTCCTCGC
TGCATTTCATGGTGGAGGTGAAGGGCGACCTGACTGCCAAGAAAATGGTGCTGGCTTTGCTG
GAGCTGGCGCgGCAGGACCACGGTGCTCTGGACTGCTGCGTGGTGGTCATTCTCTCTCACG
GCTGTCAGGCCAGCCACCTGCAGTTCCCAGGGGCTGTCTACGGCACAGATGGATGCCCTGT
GTCGGTCGAGAAGATTGTGAACATCTTCAATGGGACCAGCTGCCCCAGCCTGGGAGGGAAG
CCCAAGCTCTTTTTCATCCAGGCCTGTGGTGGGGAGCAGAAAGACCATGGGTTTGAGGTGGC
CTCCACTTCCCCTGAAGACGAGTCCCCTGGCAGTAACCCCGAGCCAGATGCCACCCCGTTCC
AGGAAGGTTTGAGGACCTTCGACCAGCTGGACGCCATATCTAGTTTGCCCACACCCAGTGAC
ATCTTTGTGTCCTACTCTACTTTCCCAGGTTTTGTTTCCTGGAGGGACCCCAAGAGTGGCTCC
TGGTACGTTGAGACCCTGGACGACATCTTTGAGCAGTGGGCTCACTCTGAAGACCTGCAGTC
CCTCCTGCTTAGGGTCGCTAATGCTGTTTCGGTGAAAGGGATTTATAAACAGATGCCTGGTTG
CTTTCAGTTCCTCCGGAAAAAACTTTTCTTTAAAACATCA
SEQ ID NO: 26, ΔCasp9 (res. 135-416) N405Q amino acid sequence
GFGDVGALESLRGNADLAYILSMEPCGHCLIINNVN
FCRESGLRTRTGSNIDCEKLRRRFSSLHFMVEVKGD
LTAKKMVLALLELARQDHGALDCCVVVILSHGCQAS
HLQFPGAVYGTDGCPVSVEKIVNIFNGTSCPSLGGK
PKLFFIQACGGEQKDHGFEVASTSPEDESPGSNPEP
DATPFQEGLRTFDQLDAISSLPTPSDIFVSYSTFPGF
VSWRDPKSGSWYVETLDDIFEQWAHSEDLQSLLLR
VANAVSVKGIYKQMPGCFQFLRKKLFFKTS
SEQ ID NO: 27, ΔCasp9 (res. 135-416) D330A N405Q nucleotide sequence
GGATTTGGTGATGTCGGTGCTCTTGAGAGTTTGAGGGGAAATGCAGATTTGGCTTACATCCTG
AGCATGGAGCCCTGTGGCCACTGCCTCATTATCAACAATGTGAACTTCTGCCGTGAGTCCGG
GCTCCGCACCCGCACTGGCTCCAACATCGACTGTGAGAAGTTGCGGCGTCGCTTCTCCTCGC
TGCATTTCATGGTGGAGGTGAAGGGCGACCTGACTGCCAAGAAAATGGTGCTGGCTTTGCTG
GAGCTGGCGCgGCAGGACCACGGTGCTCTGGACTGCTGCGTGGTGGTCATTCTCTCTCACG
GCTGTCAGGCCAGCCACCTGCAGTTCCCAGGGGCTGTCTACGGCACAGATGGATGCCCTGT
GTCGGTCGAGAAGATTGTGAACATCTTCAATGGGACCAGCTGCCCCAGCCTGGGAGGGAAG
CCCAAGCTCTTTTTCATCCAGGCCTGTGGTGGGGAGCAGAAAGACCATGGGTTTGAGGTGGC
CTCCACTTCCCCTGAAGACGAGTCCCCTGGCAGTAACCCCGAGCCAGATGCCACCCCGTTCC
AGGAAGGTTTGAGGACCTTCGACCAGCTGGCCGCCATATCTAGTTTGCCCACACCCAGTGAC
ATCTTTGTGTCCTACTCTACTTTCCCAGGTTTTGTTTCCTGGAGGGACCCCAAGAGTGGCTCC
TGGTACGTTGAGACCCTGGACGACATCTTTGAGCAGTGGGCTCACTCTGAAGACCTGCAGTC
CCTCCTGCTTAGGGTCGCTAATGCTGTTTCGGTGAAAGGGATTTATAAACAGATGCCTGGTTG
CTTTCAGTTCCTCCGGAAAAAACTTTTCTTTAAAACATCA
SEQ ID NO: 28, ΔCasp9 (res. 135-416) D330A N405Q amino acid sequence
GFGDVGALESLRGNADLAYILSMEPCGHCLIINNVN
FCRESGLRTRTGSNIDCEKLRRRFSSLHFMVEVKGD
LTAKKMVLALLELARQDHGALDCCVVVILSHGCQAS
HLQFPGAVYGTDGCPVSVEKIVNIFNGTSCPSLGGK
PKLFFIQACGGEQKDHGFEVASTSPEDESPGSNPEP
DATPFQEGLRTFDQLAAISSLPTPSDIFVSYSTFPGF
VSWRDPKSGSWYVETLDDIFEQWAHSEDLQSLLLR
VANAVSVKGIYKQMPGCFQFLRKKLFFKTS
SEQ ID NO: 29, FKBPv36 (Fv1) nucleotide sequence
GGCGTTCAAGTAGAAACAATCAGCCCAGGAGACGGAAGGACTTTCCCCAAACGAGGCCAAAC
ATGCGTAGTTCATTATACTGGGATGCTCGAAGATGGAAAAAAAGTAGATAGTAGTAGAGACCG
AAACAAACCATTTAAATTTATGTTGGGAAAACAAGAAGTAATAAGGGGCTGGGAAGAAGGTGT
AGCACAAATGTCTGTTGGCCAGCGCGCAAAACTCACAATTTCTCCTGATTATGCTTACGGAGC
TACCGGCCACCCCGGCATCATACCCCCTCATGCCACACTGGTGTTTGACGTCGAATTGCTCA
AACTGGAA
SEQ ID NO: 30, FKBPv36 (Fv1) amino acid sequence
GVQVETISPGDGRTFPKRGQTCVVHYTGMLEDGKKVDSSRDRNKPFKFMLGKQEVIRGWEEGV
AQMSVGQRAKLTISPDYAYGATGHPGIIPPHATLVFDVELLKLE
SEQ ID NO: 31, FKBPv36 (Fv2) nucleotide sequence
GGaGTgCAgGTgGAgACgATtAGtCCtGGgGAtGGgAGaACcTTtCCaAAgCGcGGtCAgACcTGtGTt
GTcCAcTAcACcGGtATGCTgGAgGAcGGgAAgAAgGTgGActcTtcacGcGAtCGcAAtAAgCCtTTcAA
gTTcATGcTcGGcAAgCAgGAgGTgATccGGGGgTGGGAgGAgGGcGTgGCtCAgATGTCgGTcGGg
CAaCGaGCgAAgCTtACcATcTCaCCcGAcTAcGCgTAtGGgGCaACgGGgCAtCCgGGaATtATcCCt
CCcCAcGCtACgCTcGTaTTcGAtGTgGAgcTcttgAAgCTtGag
SEQ ID NO: 32, FKBPv36 (Fv2) amino acid sequence
GVQVETISPGDGRTFPKRGQTCVVHYTGMLEDGKKVDSSRDRNKPFKFMLGKQEVIRGWEEGV
AQMSVGQRAKLTISPDYAYGATGHPGIIPPHATLVFDVELLKLE
SEQ ID NO: 33, ΔCD19 nucleotide sequence
ATGCCCCCTCCTAGACTGCTGTTTTTCCTGCTCTTTCTCACCCCAATGGAAGTTAGACCTGAG
GAACCACTGGTCGTTAAAGTGGAAGAAGGTGATAATGCTGTCCTCCAATGCCTTAAAGGGACC
AGCGACGGACCAACGCAGCAACTGACTTGGAGCCGGGAGTCCCCTCTCAAGCCGTTTCTCAA
GCTGTCACTTGGCCTGCCAGGTCTTGGTATTCACATGCGCCCCCTTGCCATTTGGCTCTTCAT
ATTCAATGTGTCTCAACAAATGGGTGGATTCTACCTTTGCCAGCCCGGCCCCCCTTCTGAGAA
AGCTTGGCAGCCTGGATGGACCGTCAATGTTGAAGGCTCCGGTGAGCTGTTTAGATGGAATG
TGAGCGACCTTGGCGGACTCGGTTGCGGACTGAAAAATAGGAGCTCTGAAGGACCCTCTTCT
CCCTCCGGTAAGTTGATGTCACCTAAGCTGTACGTGTGGGCCAAGGACCGCCCCGAAATCTG
GGAGGGCGAGCCTCCATGCCTGCCGCCTCGCGATTCACTGAACCAGTCTCTGTCCCAGGATC
TCACTATGGCGCCCGGATCTACTCTTTGGCTGTCTTGCGGCGTTCCCCCAGATAGCGTGTCA
AGAGGACCTCTGAGCTGGACCCACGTACACCCTAAGGGCCCTAAGAGCTTGTTGAGCCTGGA
ACTGAAGGACGACAGACCCGCACGCGATATGTGGGTAATGGAGACCGGCCTTCTGCTCCCTC
GCGCTACCGCACAGGATGCAGGGAAATACTACTGTCATAGAGGGAATCTGACTATGAGCTTT
CATCTCGAAATTACAGCACGGCCCGTTCTTTGGCATTGGCTCCTCCGGACTGGAGGCTGGAA
GGTGTCTGCCGTAACACTCGCTTACTTGATTTTTTGCCTGTGTAGCCTGGTTGGGATCCTGCA
TCTTCAGCGAGCCCTTGTATTGCGCCGAAAAAGAAAACGAATGACTGACCCTACACGACGATT
CTGA
SEQ ID NO: 34, ΔCD19 amino acid sequence
MPPPRLLFFLLFLTPMEVRPEEPLVVKVEEGDNAVLQCLKGTSDGPTQQLTWSRESPLKPFLKLSL
GLPGLGIHMRPLAIWLFIFNVSQQMGGFYLCQPGPPSEKAWQPGVVTVNVEGSGELFRWNVSDL
GGLGCGLKNRSSEGPSSPSGKLMSPKLYVWAKDRPEIWEGEPPCLPPRDSLNQSLSQDLTMAP
GSTLWLSCGVPPDSVSRGPLSVVTHVHPKGPKSLLSLELKDDRPARDMVVVMETGLLLPRATAQDA
GKYYCHRGNLTMSFHLEITARPVLWHWLLRTGGWKVSAVTLAYLIFCLCSLVGILHLQRALVLRRK
RKRMTDPTRRF*
Codon optimized iCasp9-N405Q-2A-ΔCD19 sequence: (the .co following the name
of a nucleotide sequence indicates that it is codon optimized (or the amino
acid sequence coded by the codon-optimized nucleotide sequence).
SEQ-ID NO: 35, FKBPv36.co (Fv3) nucleotide sequence
ATGCTGGAGGGAGTGCAGGTGGAGACTATTAGCCCCGGAGATGGCAGAACATTCCCCAAAAG
AGGACAGACTTGCGTCGTGCATTATACTGGAATGCTGGAAGACGGCAAGAAGGTGGACAGCA
GCCGGGACCGAAACAAGCCCTTCAAGTTCATGCTGGGGAAGCAGGAAGTGATCCGGGGCTG
GGAGGAAGGAGTCGCACAGATGTCAGTGGGACAGAGGGCCAAACTGACTATTAGCCCAGAC
TACGCTTATGGAGCAACCGGCCACCCCGGGATCATTCCCCCTCATGCTACACTGGTCTTCGA
TGTGGAGCTGCTGAAGCTGGAA
SEQ ID NO: 36, FKBPv36.co (Fv3) amino acid sequence
MLEGVQVETISPGDGRTFPKRGQTCVVHYTGMLEDGKKVDSSRDRNKPFKFMLGKQEVIRGWEE
GVAQMSVGQRAKLTISPDYAYGATGHPGIIPPHATLVFDVELLKLE
SEQ ID NO: 37, Linker.co nucleotide sequence
AGCGGAGGAGGATCCGGA
SEQ ID NO: 38, Linker.co amino acid sequence
SGGGSG
SEQ IDNO: 39, Caspase-9.co nucleotide sequence
GTGGACGGGTTTGGAGATGTGGGAGCCCTGGAATCCCTGCGGGGCAATGCCGATCTGGCTT
ACATCCTGTCTATGGAGCCTTGCGGCCACTGTCTGATCATTAACAATGTGAACTTCTGCAGAG
AGAGCGGGCTGCGGACCAGAACAGGATCCAATATTGACTGTGAAAAGCTGCGGAGAAGGTTC
TCTAGTCTGCACTTTATGGTCGAGGTGAAAGGCGATCTGACCGCTAAGAAAATGGTGCTGGC
CCTGCTGGAACTGGCTCGGCAGGACCATGGGGCACTGGATTGCTGCGTGGTCGTGATCCTG
AGTCACGGCTGCCAGGCTTCACATCTGCAGTTCCCTGGGGCAGTCTATGGAACTGACGGCTG
TCCAGTCAGCGTGGAGAAGATCGTGAACATCTTCAACGGCACCTCTTGCCCAAGTCTGGGCG
GGAAGCCCAAACTGTTCTTTATTCAGGCCTGTGGAGGCGAGCAGAAAGATCACGGCTTCGAA
GTGGCTAGCACCTCCCCCGAGGACGAATCACCTGGAAGCAACCCTGAGCCAGATGCAACCC
CCTTCCAGGAAGGCCTGAGGACATTTGACCAGCTGGATGCCATCTCAAGCCTGCCCACACCT
TCTGACATTTTCGTCTCTTACAGTACTTTCCCTGGATTTGTGAGCTGGCGCGATCCAAAGTCA
GGCAGCTGGTACGTGGAGACACTGGACGATATCTTTGAGCAGTGGGCCCATTCTGAAGACCT
GCAGAGTCTGCTGCTGCGAGTGGCCAATGCTGTCTCTGTGAAGGGGATCTACAAACAGATGC
CAGGATGCTTCCAGTTTCTGAGAAAGAAACTGTTCTTTAAGACCTCCGCATCTAGGGCC
SEQ ID NO: 40, Caspase-9.co amino acid sequence
VDGFGDVGALESLRGNADLAYILSMEPCGHCLIINNVNFCRESGLRTRTGSNIDCEKLRRRFSSLH
FMVEVKGDLTAKKMVLALLELARQDHGALDCCVVVILSHGCQASHLQFPGAVYGTDGCPVSVEKI
VNIFNGTSCPSLGGKPKLFFIQACGGEQKDHGFEVASTSPEDESPGSNPEPDATPFQEGLRTFDQ
LDAISSLPTPSDIFVSYSTFPGFVSWRDPKSGSVVYVETLDDIFEQWAHSEDLQSLLLRVANAVSVK
GIYKQMPGCFQFLRKKLFFKTSASRA
SEQ ID NO: 41, Linker.co nucleotide sequence
CCGCGG
SEQ ID NO: 42, Linker.co amino acid sequence
PR
SEQ ID NO: [[42]]308: T2A.co nucleotide sequence
GAAGGCCGAGGGAGCCTGCTGACATGTGGCGATGTGGAGGAAAACCCAGGACCA
SEQ ID NO: 43: T2A.co amino acid sequence
EGRGSLLTCGDVEEN PG P
SEQ ID NO: [[43]]309: Δ CD19.co nucleotide sequence
ATGCCACCACCTCGCCTGCTGTTCTTTCTGCTGTTCCTGACACCTATGGAGGTGCGACCTGAG
GAACCACTGGTCGTGAAGGTCGAGGAAGGCGACAATGCCGTGCTGCAGTGCCTGAAAGGCA
CTTCTGATGGGCCAACTCAGCAGCTGACCTGGTCCAGGGAGTCTCCCCTGAAGCCTTTTCTG
AAACTGAGCCTGGGACTGCCAGGACTGGGAATCCACATGCGCCCTCTGGCTATCTGGCTGTT
CATCTTCAACGTGAGCCAGCAGATGGGAGGATTCTACCTGTGCCAGCCAGGACCACCATCCG
AGAAGGCCTGGCAGCCTGGATGGACCGTCAACGTGGAGGGGTCTGGAGAACTGTTTAGGTG
GAATGTGAGTGACCTGGGAGGACTGGGATGTGGGCTGAAGAACCGCTCCTCTGAAGGCCCA
AGTTCACCCTCAGGGAAGCTGATGAGCCCAAAACTGTACGTGTGGGCCAAAGATCGGCCCGA
GATCTGGGAGGGAGAACCTCCATGCCTGCCACCTAGAGACAGCCTGAATCAGAGTCTGTCAC
AGGATCTGACAATGGCCCCCGGGTCCACTCTGTGGCTGTCTTGTGGAGTCCCACCCGACAGC
GTGTCCAGAGGCCCTCTGTCCTGGACCCACGTGCATCCTAAGGGGCCAAAAAGTCTGCTGTC
ACTGGAACTGAAGGACGATCGGCCTGCCAGAGACATGTGGGTCATGGAGACTGGACTGCTG
CTGCCACGAGCAACCGCACAGGATGCTGGAAAATACTATTGCCACCGGGGCAATCTGACAAT
GTCCTTCCATCTGGAGATCACTGCAAGGCCCGTGCTGTGGCACTGGCTGCTGCGAACCGGA
GGATGGAAGGTCAGTGCTGTGACACTGGCATATCTGATCTTTTGCCTGTGCTCCCTGGTGGG
CATTCTGCATCTGCAGAGAGCCCTGGTGCTGCGGAGAAAGAGAAAGAGAATGACTGACCCAA
CAAGAAGGTTTTGA
SEQ ID NO: [[43]]310: Δ CD19.co amino acid sequence
MPPPRLLFFLLFLTPMEVRPEEPLVVKVEEGDNAVLQCLKGTSDGPTQQLTWSRESPLKPFLKLSL
GLPGLGIHMRPLAIWLFIFNVSQQMGGFYLCQPGPPSEKAWQPGVVTVNVEGSGELFRWNVSDL
GGLGCGLKNRSSEGPSSPSGKLMSPKLYVWAKDRPEIWEGEPPCLPPRDSLNQSLSQDLTMAP
GSTLWLSCGVPPDSVSRGPLSVVTHVHPKGPKSLLSLELKDDRPARDMVVVMETGLLLPRATAQDA
GKYYCHRGNLTMSFHLEITARPVLWHWLLRTGGWKVSAVTLAYLIFCLCSLVGILHLQRALVLRRK
RKRMTDPTRRF*

TABLE 6
Additional Examples of Caspase-9 Variants

| iCasp9 Variants | DNA sequence | Amino acid sequence |
|---|---|---|
| Fv-L-Caspase9 WT-2A | Fv disclosed as SEQ ID NO: 311, | Fv disclosed as SEQ ID NO: 314, |
| | Linker disclosed as SEQ ID NO: 312, | Linker disclosed as SEQ ID NO: |
| | iCasp9 disclose as SEQ ID NO: 44 and | 315, iCasp9 disclose as SEQ ID |
| | T2A disclosed as SEQ ID NO: 313 | NO: 45 and T2A disclosed as SEQ |
| | (Fv)ATGCTCGAGGGAGTGCAGGTGGAgACtA | ID NO: 316 |
| | TCTCCCCAGGAGACGGGCGCACCTTCCCCAA | (Fv)MLEGVQVETISPGDGRTFPKRGQ |
| | GCGCGGCCAGACCTGCGTGGTGCACTACAC | TCVVHYTGMLEDGKKVDSSRDRNKP |
| | CGGGATGCTTGAAGATGGAAAGAAAGTTGA | FKFMLGKQEVIR |
| | TTCCTCCCGGGACAGAAACAAGCCCTTTAAG | GWEEGVAQMSVGQRAKLTISPDYAY |
| | TTTATGCTAGGCAAGCAGGAGGTGATCCGA | GATGHPGIIPPHATLVFDVELLKLE- |
| | GGCTGGGAAGAAGGGGTTGCCCAGATGAG | (linker)SGGGSG-(iCasp9)VDGF |
| | TGTGGGTCAGAGAGCCAAACTGACTATATCT | GDVGALESLRGNADLAYILSMEPCGH |
| | CCAGATTATGCCTATGGTGCCACTGGGCACC | CLIINNVNFCRESGLRTRTGSNIDCEKL |
| | CAGGCATCATCCCACCACATGCCACTCTCGT | RRRFSS |
| | CTTCGATGTGGAGCTTCTAAAACTGGA- | LHFMVEVKGDLTAKKMVLALLELAR |
| | (linker)TCTGGCGGTGGATCCGGA- | QDHGALDCCVVVILSHGCQASHLQF |
| | (iCasp9)GTCGACGGATTTGGTGATGTCGGT | PGAVYGTDGC |
| | GCTCTTGAGAGTTTGAGGGGAAATGCAGAT | PVSVEKIVNIFNGTSCPSLGGKPKLFFI |
| | TTGGCTTACATCCTGAGCATGGAGCCCTGTG | QACGGEQKDHGFEVASTSPEDESPG |
| | GCCACTGCCTCATTATCAACAATGTGAACTT | SNPEPDA |
| | CTGCCGTGAGTCCGGGCTCCGCACCCGCACT | TPFQEGLRTFDQLDAISSLPTPSDIFVS |
| | GGCTCCAACATCGACTGTGAGAAGTTGCGG | YSTFPGFVSWRDPKSGSWYVETLDDI |
| | CGTCGCTTCTCCTCGCTGCATTTCATGGTGG | FEQWAH |
| | AGGTGAAGGGCGACCTGACTGCCAAGAAAA | SEDLQSLLLRVANAVSVKGIYKQMPG |
| | TGGTGCTGGCTTTGCTGGAGCTGGCGCGGC | CFNFLRKKLFFKTSASRA- |
| | AGGACCACGGTGCTCTGGACTGCTGCGTGG | EGRGSLLTCGDVEENP |
| | TGGTCATTCTCTCTCACGGCTGTCAGGCCAG | GP- |
| | CCACCTGCAGTTCCCAGGGGCTGTCTACGGC | |
| | ACAGATGGATGCCCTGTGTCGGTCGAGAAG | |
| | ATTGTGAACATCTTCAATGGGACCAGCTGCC | |
| | CCAGCCTGGGAGGGAAGCCCAAGCTCTTTTT | |
| | CATCCAGGCCTGTGGTGGGGAGCAGAAAGA | |
| | CCATGGGTTTGAGGTGGCCTCCACTTCCCCT | |
| | GAAGACGAGTCCCCTGGCAGTAACCCCGAG | |
| | CCAGATGCCACCCCGTTCCAGGAAGGTTTGA | |
| | GGACCTTCGACCAGCTGGACGCCATATCTAG | |
| | TTTGCCCACACCCAGTGACATCTTTGTGTCCT | |
| | ACTCTACTTTCCCAGGTTTTGTTTCCTGGAGG | |
| | GACCCCAAGAGTGGCTCCTGGTACGTTGAG | |
| | ACCCTGGACGACATCTTTGAGCAGTGGGCTC | |
| | ACTCTGAAGACCTGCAGTCCCTCCTGCTTAG | |
| | GGTCGCTAATGCTGTTTCGGTGAAAGGGATT | |
| | TATAAACAGATGCCTGGTTGCTTTAATTTCCT | |
| | CCGGAAAAAACTTTTCTTTAAAACATCAGCT | |
| | AGCAGAGCC- | |
| | (T2A)GAGGGCAGGGGAAGTCTTCTAACATG | |
| | CGGGGACGTGGAGGAAAATCCCGGGCCC | |
| Fv-L-iCaspase9 WT | Fv disclosed as SEQ ID NO: 317, | iCaspase9 disclosed as SEQ ID NO: |
| codon optimized-T2A | Linker disclosed as SEQ ID NO: 318, | 47 and T2A disclosed as SEQ ID |
| codon optimized | iCasp9 disclose as SEQ ID NO: 46 and | NO: 320 |
| | T2A disclosed as SEQ ID NO: 319 | (Fv-L)- |
| | (Fv)- | VDGFGDVGALESLRGNADLAYILSME |
| | GGAGTGCAGGTGGAGACTATTAGCCCCGGA | PCGHCLIINNVNFCRESGLRTRTGSNI |
| | GATGGCAGAACATTCCCCAAAAGAGGACAG | DCEKLRRRFSS |
| | ACTTGCGTCGTGCATTATACTGGAATGCTGG | LHFMVEVKGDLTAKKMVLALLELAR |
| | AAGACGGCAAGAAGGTGGACAGCAGCCGG | QDHGALDCCVVVILSHGCQASHLQF |
| | GACCGAAACAAGCCCTTCAAGTTCATGCTGG | PGAVYGTDGC |
| | GGAAGCAGGAAGTGATCCGGGGCTGGGAG | PVSVEKIVNIFNGTSCPSLGGKPKLFFI |
| | GAAGGAGTCGCACAGATGTCAGTGGGACAG | QACGGEQKDHGFEVASTSPEDESPG |
| | AGGGCCAAACTGACTATTAGCCCAGACTAC | SNPEPDA |
| | GCTTATGGAGCAACCGGCCACCCCGGGATC | TPFQEGLRTFDQLDAISSLPTPSDIFVS |
| | ATTCCCCCTCATGCTACACTGGTCTTCGATGT | YSTFPGFVSWRDPKSGSWYVETLDDI |
| | GGAGCTGCTGAAGCTGGAA-(L)- | FEQWAH |
| | AGCGGAGGAGGATCCGGA-(iCasp9)- | SEDLQSLLLRVANAVSVKGIYKQMPG |
| | GTGGACGGGTTTGGAGATGTGGGAGCCCTG | CFNFLRKKLFFKTSASRA- |
| | GAATCCCTGCGGGGCAATGCCGATCTGGCTT | EGRGSLLTCGDVEENP |
| | ACATCCTGTCTATGGAGCCTTGCGGCCACTG | GP-(T2A) |
| | TCTGATCATTAACAATGTGAACTTCTGCAGA | |
| | GAGAGCGGGCTGCGGACCAGAACAGGATC | |
| | CAATATTGACTGTGAAAAGCTGCGGAGAAG | |
| | GTTCTCTAGTCTGCACTTTATGGTCGAGGTG | |
| | AAAGGCGATCTGACCGCTAAGAAAATGGTG | |
| | CTGGCCCTGCTGGAACTGGCTCGGCAGGAC | |
| | CATGGGGCACTGGATTGCTGCGTGGTCGTG | |
| | ATCCTGAGTCACGGCTGCCAGGCTTCACATC | |
| | TGCAGTTCCCTGGGGCAGTCTATGGAACTGA | |
| | CGGCTGTCCAGTCAGCGTGGAGAAGATCGT | |
| | GAACATCTTCAACGGCACCTCTTGCCCAAGT | |
| | CTGGGCGGGAAGCCCAAACTGTTCTTTATTC | |
| | AGGCCTGTGGAGGCGAGCAGAAAGATCAC | |
| | GGCTTCGAAGTGGCTAGCACCTCCCCCGAG | |
| | GACGAATCACCTGGAAGCAACCCTGAGCCA | |
| | GATGCAACCCCCTTCCAGGAAGGCCTGAGG | |
| | ACATTTGACCAGCTGGATGCCATCTCAAGCC | |
| | TGCCCACACCTTCTGACATTTTCGTCTCTTAC | |
| | AGTACTTTCCCTGGATTTGTGAGCTGGCGCG | |
| | ATCCAAAGTCAGGCAGCTGGTACGTGGAGA | |
| | CACTGGACGATATCTTTGAGCAGTGGGCCCA | |
| | TTCTGAAGACCTGCAGAGTCTGCTGCTGCGA | |
| | GTGGCCAATGCTGTCTCTGTGAAGGGGATCT | |
| | ACAAACAGATGCCAGGATGCTTCAACTTTCT | |
| | GAGAAAGAAACTGTTCTTTAAGACCTCCGCA | |
| | TCTAGGGCC-(T2A)- | |
| | CCGCGGGAAGGCCGAGGGAGCCTGCTGAC | |
| | ATGTGGCGATGTGGAGGAAAACCCAGGACC | |
| | A | |
| Fv-iCASP9 S144A-T2A | SEQ ID NO: 48 | SEQ ID NO: 49 |
| | (Fv-L)- | (Fv-L)- |
| | GTCGACGGATTTGGTGATGTCGGTGCTCTTG | VDGFGDVGALEaLRGNADLAYILSME |
| | AGgcTTTGAGGGGAAATGCAGATTTGGCTTA | PCGHCLIINNVNFCRESGLRTRTGSNI |
| | CATCCTGAGCATGGAGCCCTGTGGCCACTGC | DCEKLRRRFSSLHFMVEVKGDLTAKK |
| | CTCATTATCAACAATGTGAACTTCTGCCGTG | MVLALLELARQDHGALDCCVVVILSH |
| | AGTCCGGGCTCCGCACCCGCACTGGCTCCAA | GCQASHLQFPGAVYGTDGCPVSVEKI |
| | CATCGACTGTGAGAAGTTGCGGCGTCGCTTC | VNIFNGTSCPSLGGKPKLFFIQACGGE |
| | TCCTCGCTGCATTTCATGGTGGAGGTGAAGG | QKDHGFEVASTSPEDESPGSNPEPDA |
| | GCGACCTGACTGCCAAGAAAATGGTGCTGG | TPFQEGLRTFDQLDAISSLPTPSDIFVS |
| | CTTTGCTGGAGCTGGCGCGGCAGGACCACG | YSTFPGFVSWRDPKSGSWYVETLDDI |
| | GTGCTCTGGACTGCTGCGTGGTGGTCATTCT | FEQWAHSEDLQSLLLRVANAVSVKGI |
| | CTCTCACGGCTGTCAGGCCAGCCACCTGCAG | YKQMPGCFNFLRKKLFFKTSASRA |
| | TTCCCAGGGGCTGTCTACGGCACAGATGGA | |
| | TGCCCTGTGTCGGTCGAGAAGATTGTGAAC | |
| | ATCTTCAATGGGACCAGCTGCCCCAGCCTGG | |
| | GAGGGAAGCCCAAGCTCTTTTTCATCCAGGC | |
| | CTGTGGTGGGGAGCAGAAAGACCATGGGTT | |
| | TGAGGTGGCCTCCACTTCCCCTGAAGACGAG | |
| | TCCCCTGGCAGTAACCCCGAGCCAGATGCCA | |
| | CCCCGTTCCAGGAAGGTTTGAGGACCTTCGA | |
| | CCAGCTGGACGCCATATCTAGTTTGCCCACA | |
| | CCCAGTGACATCTTTGTGTCCTACTCTACTTT | |
| | CCCAGGTTTTGTTTCCTGGAGGGACCCCAAG | |
| | AGTGGCTCCTGGTACGTTGAGACCCTGGAC | |
| | GACATCTTTGAGCAGTGGGCTCACTCTGAAG | |
| | ACCTGCAGTCCCTCCTGCTTAGGGTCGCTAA | |
| | TGCTGTTTCGGTGAAAGGGATTTATAAACAG | |
| | ATGCCTGGTTGCTTTAATTTCCTCCGGAAAA | |
| | AACTTTTCTTTAAAACATCAGCTAGCAGAGC | |
| | C-(T2A) | |
| Fv-iCASP9 S144D-T2A | SEQ ID NO: 50 | SEQ ID NO: 51 |
| | (Fv-L)- | (Fv-L)- |
| | GTCGACGGATTTGGTGATGTCGGTGCTCTTG | VDGFGDVGALEdLRGNADLAYILSME |
| | AGgacTTGAGGGGAAATGCAGATTTGGCTTA | PCGHCLIINNVNFCRESGLRTRTGSNI |
| | CATCCTGAGCATGGAGCCCTGTGGCCACTGC | DCEKLRRRFSSLHFMVEVKGDLTAKK |
| | CTCATTATCAACAATGTGAACTTCTGCCGTG | MVLALLELARQDHGALDCCVVVILSH |
| | AGTCCGGGCTCCGCACCCGCACTGGCTCCAA | GCQASHLQFPGAVYGTDGCPVSVEKI |
| | CATCGACTGTGAGAAGTTGCGGCGTCGCTTC | VNIFNGTSCPSLGGKPKLFFIQACGGE |
| | TCCTCGCTGCATTTCATGGTGGAGGTGAAGG | QKDHGFEVASTSPEDESPGSNPEPDA |
| | GCGACCTGACTGCCAAGAAAATGGTGCTGG | TPFQEGLRTFDQLDAISSLPTPSDIFVS |
| | CTTTGCTGGAGCTGGCGCGGCAGGACCACG | YSTFPGFVSWRDPKSGSWYVETLDDI |
| | GTGCTCTGGACTGCTGCGTGGTGGTCATTCT | FEQWAHSEDLQSLLLRVANAVSVKGI |
| | CTCTCACGGCTGTCAGGCCAGCCACCTGCAG | YKQMPGCFNFLRKKLFFKTSASRA |
| | TTCCCAGGGGCTGTCTACGGCACAGATGGA | |
| | TGCCCTGTGTCGGTCGAGAAGATTGTGAAC | |
| | ATCTTCAATGGGACCAGCTGCCCCAGCCTGG | |
| | GAGGGAAGCCCAAGCTCTTTTTCATCCAGGC | |
| | CTGTGGTGGGGAGCAGAAAGACCATGGGTT | |
| | TGAGGTGGCCTCCACTTCCCCTGAAGACGAG | |
| | TCCCCTGGCAGTAACCCCGAGCCAGATGCCA | |
| | CCCCGTTCCAGGAAGGTTTGAGGACCTTCGA | |
| | CCAGCTGGACGCCATATCTAGTTTGCCCACA | |
| | CCCAGTGACATCTTTGTGTCCTACTCTACTTT | |
| | CCCAGGTTTTGTTTCCTGGAGGGACCCCAAG | |
| | AGTGGCTCCTGGTACGTTGAGACCCTGGAC | |
| | GACATCTTTGAGCAGTGGGCTCACTCTGAAG | |
| | ACCTGCAGTCCCTCCTGCTTAGGGTCGCTAA | |
| | TGCTGTTTCGGTGAAAGGGATTTATAAACAG | |
| | ATGCCTGGTTGCTTTAATTTCCTCCGGAAAA | |
| | AACTTTTCTTTAAAACATCAGCTAGCAGAGC | |
| | C-(T2A) | |
| Fv-iCASP9 S183A-T2A | SEQ ID NO: 52 | SEQ ID NO: 53 |
| | (Fv-L)- | (Fv-L)- |
| | GTCGACGGATTTGGTGATGTCGGTGCTCTTG | VDGFGDVGALESLRGNADLAYILSME |
| | AGAGTTTGAGGGGAAATGCAGATTTGGCTT | PCGHCLIINNVNFCRESGLRTRTGaNI |
| | ACATCCTGAGCATGGAGCCCTGTGGCCACTG | DCEKLRRRFSSLHFMVEVKGDLTAKK |
| | CCTCATTATCAACAATGTGAACTTCTGCCGT | MVLALLELARQDHGALDCCVVVILSH |
| | GAGTCCGGGCTCCGCACCCGCACTGGCgCCA | GCQASHLQFPGAVYGTDGCPVSVEKI |
| | ACATCGACTGTGAGAAGTTGCGGCGTCGCTT | VNIFNGTSCPSLGGKPKLFFIQACGGE |
| | CTCCTCGCTGCATTTCATGGTGGAGGTGAAG | QKDHGFEVASTSPEDESPGSNPEPDA |
| | GGCGACCTGACTGCCAAGAAAATGGTGCTG | TPFQEGLRTFDQLDAISSLPTPSDIFVS |
| | GCTTTGCTGGAGCTGGCGCGGCAGGACCAC | YSTFPGFVSWRDPKSGSWYVETLDDI |
| | GGTGCTCTGGACTGCTGCGTGGTGGTCATTC | FEQWAHSEDLQSLLLRVANAVSVKGI |
| | TCTCTCACGGCTGTCAGGCCAGCCACCTGCA | YKQMPGCFNFLRKKLFFKTSASRA- |
| | GTTCCCAGGGGCTGTCTACGGCACAGATGG | (T2A) |
| | ATGCCCTGTGTCGGTCGAGAAGATTGTGAA | |
| | CATCTTCAATGGGACCAGCTGCCCCAGCCTG | |
| | GGAGGGAAGCCCAAGCTCTTTTTCATCCAGG | |
| | CCTGTGGTGGGGAGCAGAAAGACCATGGGT | |
| | TTGAGGTGGCCTCCACTTCCCCTGAAGACGA | |
| | GTCCCCTGGCAGTAACCCCGAGCCAGATGCC | |
| | ACCCCGTTCCAGGAAGGTTTGAGGACCTTCG | |
| | ACCAGCTGGACGCCATATCTAGTTTGCCCAC | |
| | ACCCAGTGACATCTTTGTGTCCTACTCTACTT | |
| | TCCCAGGTTTTGTTTCCTGGAGGGACCCCAA | |
| | GAGTGGCTCCTGGTACGTTGAGACCCTGGA | |
| | CGACATCTTTGAGCAGTGGGCTCACTCTGAA | |
| | GACCTGCAGTCCCTCCTGCTTAGGGTCGCTA | |
| | ATGCTGTTTCGGTGAAAGGGATTTATAAACA | |
| | GATGCCTGGTTGCTTTAATTTCCTCCGGAAA | |
| | AAACTTTTCTTTAAAACATCAGCTAGCAGAG | |
| | CC-(T2A) | |
| Fv-iCASP9 S196A-T2A | SEQ ID NO: 54 | SEQ ID NO: 55 |
| | (Fv-L)- | (Fv-L)- |
| | GTCGACGGATTTGGTGATGTCGGTGCTCTTG | VDGFGDVGALESLRGNADLAYILSME |
| | AGAGTTTGAGGGGAAATGCAGATTTGGCTT | PCGHCLIINNVNFCRESGLRTRTGSNI |
| | ACATCCTGAGCATGGAGCCCTGTGGCCACTG | DCEKLRRRFSaLHFMVEVKGDLTAKK |
| | CCTCATTATCAACAATGTGAACTTCTGCCGT | MVLALLELARQDHGALDCCVVVILSH |
| | GAGTCCGGGCTCCGCACCCGCACTGGCTCCA | GCQASHLQFPGAVYGTDGCPVSVEKI |
| | ACATCGACTGTGAGAAGTTGCGGCGTCGCTT | VNIFNGTSCPSLGGKPKLFFIQACGGE |
| | CTCCgCGCTGCATTTCATGGTGGAGGTGAAG | QKDHGFEVASTSPEDESPGSNPEPDA |
| | GGCGACCTGACTGCCAAGAAAATGGTGCTG | TPFQEGLRTFDQLDAISSLPTPSDIFVS |
| | GCTTTGCTGGAGCTGGCGCGGCAGGACCAC | YSTFPGFVSWRDPKSGSWYVETLDDI |
| | GGTGCTCTGGACTGCTGCGTGGTGGTCATTC | FEQWAHSEDLQSLLLRVANAVSVKGI |
| | TCTCTCACGGCTGTCAGGCCAGCCACCTGCA | YKQMPGCFNFLRKKLFFKTSASRA- |
| | GTTCCCAGGGGCTGTCTACGGCACAGATGG | (T2A) |
| | ATGCCCTGTGTCGGTCGAGAAGATTGTGAA | |
| | CATCTTCAATGGGACCAGCTGCCCCAGCCTG | |
| | GGAGGGAAGCCCAAGCTCTTTTTCATCCAGG | |
| | CCTGTGGTGGGGAGCAGAAAGACCATGGGT | |
| | TTGAGGTGGCCTCCACTTCCCCTGAAGACGA | |
| | GTCCCCTGGCAGTAACCCCGAGCCAGATGCC | |
| | ACCCCGTTCCAGGAAGGTTTGAGGACCTTCG | |
| | ACCAGCTGGACGCCATATCTAGTTTGCCCAC | |
| | ACCCAGTGACATCTTTGTGTCCTACTCTACTT | |
| | TCCCAGGTTTTGTTTCCTGGAGGGACCCCAA | |
| | GAGTGGCTCCTGGTACGTTGAGACCCTGGA | |
| | CGACATCTTTGAGCAGTGGGCTCACTCTGAA | |
| | GACCTGCAGTCCCTCCTGCTTAGGGTCGCTA | |
| | ATGCTGTTTCGGTGAAAGGGATTTATAAACA | |
| | GATGCCTGGTTGCTTTAATTTCCTCCGGAAA | |
| | AAACTTTTCTTTAAAACATCAGCTAGCAGAG | |
| | CC-(T2A) | |
| Fv-iCASP9 5196D-T2A | SEQ ID NO: 56 | SEQ ID NO: 57 |
| | (Fv-L)- | (Fv-L)- |
| | GTCGACGGATTTGGTGATGTCGGTGCTCTTG | VDGFGDVGALESLRGNADLAYILSME |
| | AGAGTTTGAGGGGAAATGCAGATTTGGCTT | PCGHCLIINNVNFCRESGLRTRTGSNI |
| | ACATCCTGAGCATGGAGCCCTGTGGCCACTG | DCEKLRRRFSdLHFMVEVKGDLTAKK |
| | CCTCATTATCAACAATGTGAACTTCTGCCGT | MVLALLELARQDHGALDCCVVVILSH |
| | GAGTCCGGGCTCCGCACCCGCACTGGCTCCA | GCQASHLQFPGAVYGTDGCPVSVEKI |
| | ACATCGACTGTGAGAAGTTGCGGCGTCGCTT | VNIFNGTSCPSLGGKPKLFFIQACGGE |
| | CTCCgacCTGCATTTCATGGTGGAGGTGAAG | QKDHGFEVASTSPEDESPGSNPEPDA |
| | GGCGACCTGACTGCCAAGAAAATGGTGCTG | TPFQEGLRTFDQLDAISSLPTPSDIFVS |
| | GCTTTGCTGGAGCTGGCGCGGCAGGACCAC | YSTFPGFVSWRDPKSGSWYVETLDDI |
| | GGTGCTCTGGACTGCTGCGTGGTGGTCATTC | FEQWAHSEDLQSLLLRVANAVSVKGI |
| | TCTCTCACGGCTGTCAGGCCAGCCACCTGCA | YKQMPGCFNFLRKKLFFKTSASRA- |
| | GTTCCCAGGGGCTGTCTACGGCACAGATGG | (T2A) |
| | ATGCCCTGTGTCGGTCGAGAAGATTGTGAA | |
| | CATCTTCAATGGGACCAGCTGCCCCAGCCTG | |
| | GGAGGGAAGCCCAAGCTCTTTTTCATCCAGG | |
| | CCTGTGGTGGGGAGCAGAAAGACCATGGGT | |
| | TTGAGGTGGCCTCCACTTCCCCTGAAGACGA | |
| | GTCCCCTGGCAGTAACCCCGAGCCAGATGCC | |
| | ACCCCGTTCCAGGAAGGTTTGAGGACCTTCG | |
| | ACCAGCTGGACGCCATATCTAGTTTGCCCAC | |
| | ACCCAGTGACATCTTTGTGTCCTACTCTACTT | |
| | TCCCAGGTTTTGTTTCCTGGAGGGACCCCAA | |
| | GAGTGGCTCCTGGTACGTTGAGACCCTGGA | |
| | CGACATCTTTGAGCAGTGGGCTCACTCTGAA | |
| | GACCTGCAGTCCCTCCTGCTTAGGGTCGCTA | |
| | ATGCTGTTTCGGTGAAAGGGATTTATAAACA | |
| | GATGCCTGGTTGCTTTAATTTCCTCCGGAAA | |
| | AAACTTTTCTTTAAAACATCAGCTAGCAGAG | |
| | CC-(T2A) | |
| Fv-iCASP9 C285A-T2A | SEQ ID NO: 58 | SEQ ID NO: 59 |
| | (Fv-L)- | (Fv-L)- |
| | GTCGACGGATTTGGTGATGTCGGTGCTCTTG | VDGFGDVGALESLRGNADLAYILSME |
| | AGAGTTTGAGGGGAAATGCAGATTTGGCTT | PCGHCLIINNVNFCRESGLRTRTGSNI |
| | ACATCCTGAGCATGGAGCCCTGTGGCCACTG | DCEKLRRRFSSLHFMVEVKGDLTAKK |
| | CCTCATTATCAACAATGTGAACTTCTGCCGT | MVLALLELARQDHGALDCCVVVILSH |
| | GAGTCCGGGCTCCGCACCCGCACTGGCTCCA | GCQASHLQFPGAVYGTDGCPVSVEKI |
| | ACATCGACTGTGAGAAGTTGCGGCGTCGCTT | VNIFNGTSCPSLGGKPKLFFIQAaGGE |
| | CTCCTCGCTGCATTTCATGGTGGAGGTGAAG | QKDHGFEVASTSPEDESPGSNPEPDA |
| | GGCGACCTGACTGCCAAGAAAATGGTGCTG | TPFQEGLRTFDQLDAISSLPTPSDIFVS |
| | GCTTTGCTGGAGCTGGCGCGGCAGGACCAC | YSTFPGFVSWRDPKSGSWYVETLDDI |
| | GGTGCTCTGGACTGCTGCGTGGTGGTCATTC | FEQWAHSEDLQSLLLRVANAVSVKGI |
| | TCTCTCACGGCTGTCAGGCCAGCCACCTGCA | YKQMPGCFNFLRKKLFFKTSASRA- |
| | GTTCCCAGGGGCTGTCTACGGCACAGATGG | (T2A) |
| | ATGCCCTGTGTCGGTCGAGAAGATTGTGAA | |
| | CATCTTCAATGGGACCAGCTGCCCCAGCCTG | |
| | GGAGGGAAGCCCAAGCTCTTTTTCATCCAGG | |
| | CCgcgGGTGGGGAGCAGAAAGACCATGGGT | |
| | TTGAGGTGGCCTCCACTTCCCCTGAAGACGA | |
| | GTCCCCTGGCAGTAACCCCGAGCCAGATGCC | |
| | ACCCCGTTCCAGGAAGGTTTGAGGACCTTCG | |
| | ACCAGCTGGACGCCATATCTAGTTTGCCCAC | |
| | ACCCAGTGACATCTTTGTGTCCTACTCTACTT | |
| | TCCCAGGTTTTGTTTCCTGGAGGGACCCCAA | |
| | GAGTGGCTCCTGGTACGTTGAGACCCTGGA | |
| | CGACATCTTTGAGCAGTGGGCTCACTCTGAA | |
| | GACCTGCAGTCCCTCCTGCTTAGGGTCGCTA | |
| | ATGCTGTTTCGGTGAAAGGGATTTATAAACA | |
| | GATGCCTGGTTGCTTTAATTTCCTCCGGAAA | |
| | AAACTTTTCTTTAAAACATCAGCTAGCAGAG | |
| | CC-(T2A) | |
| Fv-iCASP9 A316G-T2A | SEQ ID NO: 60 | SEQ ID NO: 61 |
| | (Fv-L)- | (Fv-L)- |
| | GTCGACGGATTTGGTGATGTCGGTGCTCTTG | VDGFGDVGALESLRGNADLAYILSME |
| | AGAGTTTGAGGGGAAATGCAGATTTGGCTT | PCGHCLIINNVNFCRESGLRTRTGSNI |
| | ACATCCTGAGCATGGAGCCCTGTGGCCACTG | DCEKLRRRFSSLHFMVEVKGDLTAKK |
| | CCTCATTATCAACAATGTGAACTTCTGCCGT | MVLALLELARQDHGALDCCVVVILSH |
| | GAGTCCGGGCTCCGCACCCGCACTGGCTCCA | GCQASHLQFPGAVYGTDGCPVSVEKI |
| | ACATCGACTGTGAGAAGTTGCGGCGTCGCTT | VNIFNGTSCPSLGGKPKLFFIQACGGE |
| | CTCCTCGCTGCATTTCATGGTGGAGGTGAAG | QKDHGFEVASTSEDESPGSNPEPDg |
| | GGCGACCTGACTGCCAAGAAAATGGTGCTG | TPFQEGLRTFDQLDAISSLPTPSDIFVS |
| | GCTTTGCTGGAGCTGGCGCGGCAGGACCAC | YSTFPGFVSWRDPKSGSWYVETLDDI |
| | GGTGCTCTGGACTGCTGCGTGGTGGTCATTC | FEQWAHSEDLQSLLLRVANAVSVKGI |
| | TCTCTCACGGCTGTCAGGCCAGCCACCTGCA | YKQMPGCFNFLRKKLFFKTSASRA- |
| | GTTCCCAGGGGCTGTCTACGGCACAGATGG | (T2A) |
| | ATGCCCTGTGTCGGTCGAGAAGATTGTGAA | |
| | CATCTTCAATGGGACCAGCTGCCCCAGCCTG | |
| | GGAGGGAAGCCCAAGCTCTTTTTCATCCAGG | |
| | CCTGTGGTGGGGAGCAGAAAGACCATGGGT | |
| | TTGAGGTGGCCTCCACTTCCCCTGAAGACGA | |
| | GTCCCCTGGCAGTAACCCCGAGCCAGATGgC | |
| | ACCCCGTTCCAGGAAGGTTTGAGGACCTTCG | |
| | ACCAGCTGGACGCCATATCTAGTTTGCCCAC | |
| | ACCCAGTGACATCTTTGTGTCCTACTCTACTT | |
| | TCCCAGGTTTTGTTTCCTGGAGGGACCCCAA | |
| | GAGTGGCTCCTGGTACGTTGAGACCCTGGA | |
| | CGACATCTTTGAGCAGTGGGCTCACTCTGAA | |
| | GACCTGCAGTCCCTCCTGCTTAGGGTCGCTA | |
| | ATGCTGTTTCGGTGAAAGGGATTTATAAACA | |
| | GATGCCTGGTTGCTTTAATTTCCTCCGGAAA | |
| | AAACTTTTCTTTAAAACATCAGCTAGCAGAG | |
| | CC-(T2A) | |
| Fv-iCASP9 T317A-T2A | SEQ ID NO: 62 | SEQ ID NO: 63 |
| | (Fv-L)- | (Fv-L)- |
| | GTCGACGGATTTGGTGATGTCGGTGCTCTTG | VDGFGDVGALESLRGNADLAYILSME |
| | AGAGTTTGAGGGGAAATGCAGATTTGGCTT | PCGHCLIINNVNFCRESGLRTRTGSNI |
| | ACATCCTGAGCATGGAGCCCTGTGGCCACTG | DCEKLRRRFSS |
| | CCTCATTATCAACAATGTGAACTTCTGCCGT | LHFMVEVKGDLTAKKMVLALLELAR |
| | GAGTCCGGGCTCCGCACCCGCACTGGCTCCA | QDHGALDCCVVVILSHGCQASHLQF |
| | ACATCGACTGTGAGAAGTTGCGGCGTCGCTT | PGAVYGTDGC |
| | CTCCTCGCTGCATTTCATGGTGGAGGTGAAG | PVSVEKIVNIFNGTSCPSLGGKPKLFFI |
| | GGCGACCTGACTGCCAAGAAAATGGTGCTG | QACGGEQKDHGFEVASTSPEDESPG |
| | GCTTTGCTGGAGCTGGCGCGGCAGGACCAC | SNPEPDA |
| | GGTGCTCTGGACTGCTGCGTGGTGGTCATTC | aPFQEGLRTFDQLDAISSLPTPSDIFVS |
| | TCTCTCACGGCTGTCAGGCCAGCCACCTGCA | YSTFPGFVSWRDPKSGSWYVETLDDI |
| | GTTCCCAGGGGCTGTCTACGGCACAGATGG | FEQWAH |
| | ATGCCCTGTGTCGGTCGAGAAGATTGTGAA | SEDLQSLLLRVANAVSVKGIYKQMPG |
| | CATCTTCAATGGGACCAGCTGCCCCAGCCTG | CFNFLRKKLFFKTSASRA-(T2A) |
| | GGAGGGAAGCCCAAGCTCTTTTTCATCCAGG | |
| | CCTGTGGTGGGGAGCAGAAAGACCATGGGT | |
| | TTGAGGTGGCCTCCACTTCCCCTGAAGACGA | |
| | GTCCCCTGGCAGTAACCCCGAGCCAGATGCC | |
| | gCCCCGTTCCAGGAAGGTTTGAGGACCTTCG | |
| | ACCAGCTGGACGCCATATCTAGTTTGCCCAC | |
| | ACCCAGTGACATCTTTGTGTCCTACTCTACTT | |
| | TCCCAGGTTTTGTTTCCTGGAGGGACCCCAA | |
| | GAGTGGCTCCTGGTACGTTGAGACCCTGGA | |
| | CGACATCTTTGAGCAGTGGGCTCACTCTGAA | |
| | GACCTGCAGTCCCTCCTGCTTAGGGTCGCTA | |
| | ATGCTGTTTCGGTGAAAGGGATTTATAAACA | |
| | GATGCCTGGTTGCTTTAATTTCCTCCGGAAA | |
| | AAACTTTTCTTTAAAACATCAGCTAGCAGAG | |
| | CC-(T2A) | |
| Fv-iCASP9 T317C-T2A | SEQ ID NO: 64 | SEQ ID NO: 65 |
| | (Fv-L)- | (Fv-L)- |
| | GTCGACGGATTTGGTGATGTCGGTGCTCTTG | VDGFGDVGALESLRGNADLAYILSME |
| | AGAGTTTGAGGGGAAATGCAGATTTGGCTT | PCGHCLIINNVNFCRESGLRTRTGSNI |
| | ACATCCTGAGCATGGAGCCCTGTGGCCACTG | DCEKLRRRFSS |
| | CCTCATTATCAACAATGTGAACTTCTGCCGT | LHFMVEVKGDLTAKKMVLALLELAR |
| | GAGTCCGGGCTCCGCACCCGCACTGGCTCCA | QDHGALDCCVVVILSHGCQASHLQF |
| | ACATCGACTGTGAGAAGTTGCGGCGTCGCTT | PGAVYGTDGC |
| | CTCCTCGCTGCATTTCATGGTGGAGGTGAAG | PVSVEKIVNIFNGTSCPSLGGKPKLFFI |
| | GGCGACCTGACTGCCAAGAAAATGGTGCTG | QACGGEQKDHGFEVASTSPEDESPG |
| | GCTTTGCTGGAGCTGGCGCGGCAGGACCAC | SNPEPDA |
| | GGTGCTCTGGACTGCTGCGTGGTGGTCATTC | cPFQEGLRTFDQLDAISSLPTPSDIFVS |
| | TCTCTCACGGCTGTCAGGCCAGCCACCTGCA | YSTFPGFVSWRDPKSGSWYVETLDDI |
| | GTTCCCAGGGGCTGTCTACGGCACAGATGG | FEQWAH |
| | ATGCCCTGTGTCGGTCGAGAAGATTGTGAA | SEDLQSLLLRVANAVSVKGIYKQMPG |
| | CATCTTCAATGGGACCAGCTGCCCCAGCCTG | CFNFLRKKLFFKTSASRA-(T2A) |
| | GGAGGGAAGCCCAAGCTCTTTTTCATCCAGG | |
| | CCTGTGGTGGGGAGCAGAAAGACCATGGGT | |
| | TTGAGGTGGCCTCCACTTCCCCTGAAGACGA | |
| | GTCCCCTGGCAGTAACCCCGAGCCAGATGCC | |
| | tgCCCGTTCCAGGAAGGTTTGAGGACCTTCG | |
| | ACCAGCTGGACGCCATATCTAGTTTGCCCAC | |
| | ACCCAGTGACATCTTTGTGTCCTACTCTACTT | |
| | TCCCAGGTTTTGTTTCCTGGAGGGACCCCAA | |
| | GAGTGGCTCCTGGTACGTTGAGACCCTGGA | |
| | CGACATCTTTGAGCAGTGGGCTCACTCTGAA | |
| | GACCTGCAGTCCCTCCTGCTTAGGGTCGCTA | |
| | ATGCTGTTTCGGTGAAAGGGATTTATAAACA | |
| | GATGCCTGGTTGCTTTAATTTCCTCCGGAAA | |
| | AAACTTTTCTTTAAAACATCAGCTAGCAGAG | |
| | CC-(T2A) | |
| Fv-iCASP9 T317S-T2A | SEQ ID NO: 66 | SEQ ID NO: 67 |
| | (Fv-L)- | (Fv-L)- |
| | GTCGACGGATTTGGTGATGTCGGTGCTCTTG | VDGFGDVGALESLRGNADLAYILSME |
| | AGAGTTTGAGGGGAAATGCAGATTTGGCTT | PCGHCLIINNVNFCRESGLRTRTGSNI |
| | ACATCCTGAGCATGGAGCCCTGTGGCCACTG | DCEKLRRRFSS |
| | CCTCATTATCAACAATGTGAACTTCTGCCGT | LHFMVEVKGDLTAKKMVLALLELAR |
| | GAGTCCGGGCTCCGCACCCGCACTGGCTCCA | QDHGALDCCVVVILSHGCQASHLQF |
| | ACATCGACTGTGAGAAGTTGCGGCGTCGCTT | PGAVYGTDGC |
| | CTCCTCGCTGCATTTCATGGTGGAGGTGAAG | PVSVEKIVNIFNGTSCPSLGGKPKLFFI |
| | GGCGACCTGACTGCCAAGAAAATGGTGCTG | QACGGEQKDHGFEVASTSPEDESPG |
| | GCTTTGCTGGAGCTGGCGCGGCAGGACCAC | SNPEPDA |
| | GGTGCTCTGGACTGCTGCGTGGTGGTCATTC | sPFQEGLRTFDQLDAISSLPTPSDIFVS |
| | TCTCTCACGGCTGTCAGGCCAGCCACCTGCA | YSTFPGFVSWRDPKSGSWYVETLDDI |
| | GTTCCCAGGGGCTGTCTACGGCACAGATGG | FEQWAH |
| | ATGCCCTGTGTCGGTCGAGAAGATTGTGAA | SEDLQSLLLRVANAVSVKGIYKQMPG |
| | CATCTTCAATGGGACCAGCTGCCCCAGCCTG | CFNFLRKKLFFKTSASRA-(T2A) |
| | GGAGGGAAGCCCAAGCTCTTTTTCATCCAGG | |
| | CCTGTGGTGGGGAGCAGAAAGACCATGGGT | |
| | TTGAGGTGGCCTCCACTTCCCCTGAAGACGA | |
| | GTCCCCTGGCAGTAACCCCGAGCCAGATGCC | |
| | tCCCCGTTCCAGGAAGGTTTGAGGACCTTCG | |
| | ACCAGCTGGACGCCATATCTAGTTTGCCCAC | |
| | ACCCAGTGACATCTTTGTGTCCTACTCTACTT | |
| | TCCCAGGTTTTGTTTCCTGGAGGGACCCCAA | |
| | GAGTGGCTCCTGGTACGTTGAGACCCTGGA | |
| | CGACATCTTTGAGCAGTGGGCTCACTCTGAA | |
| | GACCTGCAGTCCCTCCTGCTTAGGGTCGCTA | |
| | ATGCTGTTTCGGTGAAAGGGATTTATAAACA | |
| | GATGCCTGGTTGCTTTAATTTCCTCCGGAAA | |
| | AAACTTTTCTTTAAAACATCAGCTAGCAGAG | |
| | CC-(T2A) | |
| Fv-iCASP9 F326K-T2A | SEQ ID NO: 68 | SEQ ID NO: 69 |
| | (Fv-L)- | (Fv-L)- |
| | GTCGACGGATTTGGTGATGTCGGTGCTCTTG | VDGFGDVGALESLRGNADLAYILSME |
| | AGAGTTTGAGGGGAAATGCAGATTTGGCTT | PCGHCLIINNVNFCRESGLRTRTGSNI |
| | ACATCCTGAGCATGGAGCCCTGTGGCCACTG | DCEKLRRRFSSLHFMVEVKGDLTAKK |
| | CCTCATTATCAACAATGTGAACTTCTGCCGT | MVLALLELARQDHGALDCCVVVILSH |
| | GAGTCCGGGCTCCGCACCCGCACTGGCTCCA | GCQASHLQFPGAVYGTDGCPVSVEKI |
| | ACATCGACTGTGAGAAGTTGCGGCGTCGCTT | VNIFNGTSCPSLGGKPKLFFIQACGGE |
| | CTCCTCGCTGCATTTCATGGTGGAGGTGAAG | QKDHGFEVASTSPEDESPGSNPEPDA |
| | GGCGACCTGACTGCCAAGAAAATGGTGCTG | TPFQEGLRTkDQLDAISSLPTPSDIFVS |
| | GCTTTGCTGGAGCTGGCGCGGCAGGACCAC | YSTFPGFVSWRDPKSGSWYVETLDDI |
| | GGTGCTCTGGACTGCTGCGTGGTGGTCATTC | FEQWAHSEDLQSLLLRVANAVSVKGI |
| | TCTCTCACGGCTGTCAGGCCAGCCACCTGCA | YKQMPGCFNFLRKKLFFKTSASRA |
| | GTTCCCAGGGGCTGTCTACGGCACAGATGG | |
| | ATGCCCTGTGTCGGTCGAGAAGATTGTGAA | |
| | CATCTTCAATGGGACCAGCTGCCCCAGCCTG | |
| | GGAGGGAAGCCCAAGCTCTTTTTCATCCAGG | |
| | CCTGTGGTGGGGAGCAGAAAGACCATGGGT | |
| | TTGAGGTGGCCTCCACTTCCCCTGAAGACGA | |
| | GTCCCCTGGCAGTAACCCCGAGCCAGATGCC | |
| | ACCCCGTTCCAGGAAGGTTTGAGGACCaagG | |
| | ACCAGCTGGACGCCATATCTAGTTTGCCCAC | |
| | ACCCAGTGACATCTTTGTGTCCTACTCTACTT | |
| | TCCCAGGTTTTGTTTCCTGGAGGGACCCCAA | |
| | GAGTGGCTCCTGGTACGTTGAGACCCTGGA | |
| | CGACATCTTTGAGCAGTGGGCTCACTCTGAA | |
| | GACCTGCAGTCCCTCCTGCTTAGGGTCGCTA | |
| | ATGCTGTTTCGGTGAAAGGGATTTATAAACA | |
| | GATGCCTGGTTGCTTTAATTTCCTCCGGAAA | |
| | AAACTTTTCTTTAAAACATCAGCTAGCAGAG | |
| | CC | |
| Fv-iCASP9 D327K-T2A | SEQ ID NO: 70 | SEQ ID NO: 71 |
| | (Fv-L)- | (Fv-L)- |
| | GTCGACGGATTTGGTGATGTCGGTGCTCTTG | VDGFGDVGALESLRGNADLAYILSME |
| | AGAGTTTGAGGGGAAATGCAGATTTGGCTT | PCGHCLIINNVNFCRESGLRTRTGSNI |
| | ACATCCTGAGCATGGAGCCCTGTGGCCACTG | DCEKLRRRFSSLHFMVEVKGDLTAKK |
| | CCTCATTATCAACAATGTGAACTTCTGCCGT | MVLALLELARQDHGALDCCVVVILSH |
| | GAGTCCGGGCTCCGCACCCGCACTGGCTCCA | GCQASHLQFPGAVYGTDGCPVSVEKI |
| | ACATCGACTGTGAGAAGTTGCGGCGTCGCTT | VNIFNGTSCPSLGGKPKLFFIQACGGE |
| | CTCCTCGCTGCATTTCATGGTGGAGGTGAAG | QKDHGFEVASTSPEDESPGSNPEPDA |
| | GGCGACCTGACTGCCAAGAAAATGGTGCTG | TPFQEGLRTFkQLDAISSLPTPSDIFVS |
| | GCTTTGCTGGAGCTGGCGCGGCAGGACCAC | YSTFPGFVSWRDPKSGSWYVETLDDI |
| | GGTGCTCTGGACTGCTGCGTGGTGGTCATTC | FEQWAHSEDLQSLLLRVANAVSVKGI |
| | TCTCTCACGGCTGTCAGGCCAGCCACCTGCA | YKQMPGCFNFLRKKLFFKTSASRA- |
| | GTTCCCAGGGGCTGTCTACGGCACAGATGG | (T2A) |
| | ATGCCCTGTGTCGGTCGAGAAGATTGTGAA | |
| | CATCTTCAATGGGACCAGCTGCCCCAGCCTG | |
| | GGAGGGAAGCCCAAGCTCTTTTTCATCCAGG | |
| | CCTGTGGTGGGGAGCAGAAAGACCATGGGT | |
| | TTGAGGTGGCCTCCACTTCCCCTGAAGACGA | |
| | GTCCCCTGGCAGTAACCCCGAGCCAGATGCC | |
| | ACCCCGTTCCAGGAAGGTTTGAGGACCTTCa | |
| | AgCAGCTGGACGCCATATCTAGTTTGCCCAC | |
| | ACCCAGTGACATCTTTGTGTCCTACTCTACTT | |
| | TCCCAGGTTTTGTTTCCTGGAGGGACCCCAA | |
| | GAGTGGCTCCTGGTACGTTGAGACCCTGGA | |
| | CGACATCTTTGAGCAGTGGGCTCACTCTGAA | |
| | GACCTGCAGTCCCTCCTGCTTAGGGTCGCTA | |
| | ATGCTGTTTCGGTGAAAGGGATTTATAAACA | |
| | GATGCCTGGTTGCTTTAATTTCCTCCGGAAA | |
| | AAACTTTTCTTTAAAACATCAGCTAGCAGAG | |
| | CC-(T2A) | |
| Fv-iCASP9 D327R-T2A | SEQ ID NO: 72 | SEQ ID NO: 73 |
| | GTCGACGGATTTGGTGATGTCGGTGCTCTTG | (Fv-L)- |
| | AGAGTTTGAGGGGAAATGCAGATTTGGCTT | VDGFGDVGALESLRGNADLAYILSME |
| | ACATCCTGAGCATGGAGCCCTGTGGCCACTG | PCGHCLIINNVNFCRESGLRTRTGSNI |
| | CCTCATTATCAACAATGTGAACTTCTGCCGT | DCEKLRRRFSSLHFMVEVKGDLTAKK |
| | GAGTCCGGGCTCCGCACCCGCACTGGCTCCA | MVLALLELARQDHGALDCCVVVILSH |
| | ACATCGACTGTGAGAAGTTGCGGCGTCGCTT | GCQASHLQFPGAVYGTDGCPVSVEKI |
| | CTCCTCGCTGCATTTCATGGTGGAGGTGAAG | VNIFNGTSCPSLGGKPKLFFIQACGGE |
| | GGCGACCTGACTGCCAAGAAAATGGTGCTG | QKDHGFEVASTSPEDESPGSNPEPDA |
| | GCTTTGCTGGAGCTGGCGCGGCAGGACCAC | TPFQEGLRTFrQLDAISSLPTPSDIFVSY |
| | GGTGCTCTGGACTGCTGCGTGGTGGTCATTC | STFPGFVSWRDPKSGSWYVETLDDIF |
| | TCTCTCACGGCTGTCAGGCCAGCCACCTGCA | EQWAHSEDLQSLLLRVANAVSVKGIY |
| | GTTCCCAGGGGCTGTCTACGGCACAGATGG | KQMPGCFNFLRKKLFFKTSASRA- |
| | ATGCCCTGTGTCGGTCGAGAAGATTGTGAA | (T2A) |
| | CATCTTCAATGGGACCAGCTGCCCCAGCCTG | |
| | GGAGGGAAGCCCAAGCTCTTTTTCATCCAGG | |
| | CCTGTGGTGGGGAGCAGAAAGACCATGGGT | |
| | TTGAGGTGGCCTCCACTTCCCCTGAAGACGA | |
| | GTCCCCTGGCAGTAACCCCGAGCCAGATGCC | |
| | ACCCCGTTCCAGGAAGGTTTGAGGACCTTCa | |
| | ggCAGCTGGACGCCATATCTAGTTTGCCCAC | |
| | ACCCAGTGACATCTTTGTGTCCTACTCTACTT | |
| | TCCCAGGTTTTGTTTCCTGGAGGGACCCCAA | |
| | GAGTGGCTCCTGGTACGTTGAGACCCTGGA | |
| | CGACATCTTTGAGCAGTGGGCTCACTCTGAA | |
| | GACCTGCAGTCCCTCCTGCTTAGGGTCGCTA | |
| | ATGCTGTTTCGGTGAAAGGGATTTATAAACA | |
| | GATGCCTGGTTGCTTTAATTTCCTCCGGAAA | |
| | AAACTTTTCTTTAAAACATCAGCTAGCAGAG | |
| | CC-(T2A) | |
| Fv-iCASP9 D327G- | SEQ ID NO: 74 | SEQ ID NO: 75 |
| T2A | GTCGACGGATTTGGTGATGTCGGTGCTCTTG | (Fv-L)- |
| | AGAGTTTGAGGGGAAATGCAGATTTGGCTT | VDGFGDVGALESLRGNADLAYILSME |
| | ACATCCTGAGCATGGAGCCCTGTGGCCACTG | PCGHCLIINNVNFCRESGLRTRTGSNI |
| | CCTCATTATCAACAATGTGAACTTCTGCCGT | DCEKLRRRFSSLHFMVEVKGDLTAKK |
| | GAGTCCGGGCTCCGCACCCGCACTGGCTCCA | MVLALLELARQDHGALDCCVVVILSH |
| | ACATCGACTGTGAGAAGTTGCGGCGTCGCTT | GCQASHLQFPGAVYGTDGCPVSVEKI |
| | CTCCTCGCTGCATTTCATGGTGGAGGTGAAG | VNIFNGTSCPSLGGKPKLFFIQACGGE |
| | GGCGACCTGACTGCCAAGAAAATGGTGCTG | QKDHGFEVASTSPEDESPGSNPEPDA |
| | GCTTTGCTGGAGCTGGCGCGGCAGGACCAC | TPFQEGLRTFgQLDAISSLPTPSDIFVS |
| | GGTGCTCTGGACTGCTGCGTGGTGGTCATTC | YSTFPGFVSWRDPKSGSWYVETLDDI |
| | TCTCTCACGGCTGTCAGGCCAGCCACCTGCA | FEQWAHSEDLQSLLLRVANAVSVKGI |
| | GTTCCCAGGGGCTGTCTACGGCACAGATGG | YKQMPGCFNFLRKKLFFKTSASRA- |
| | ATGCCCTGTGTCGGTCGAGAAGATTGTGAA | (T2A) |
| | CATCTTCAATGGGACCAGCTGCCCCAGCCTG | |
| | GGAGGGAAGCCCAAGCTCTTTTTCATCCAGG | |
| | CCTGTGGTGGGGAGCAGAAAGACCATGGGT | |
| | TTGAGGTGGCCTCCACTTCCCCTGAAGACGA | |
| | GTCCCCTGGCAGTAACCCCGAGCCAGATGCC | |
| | ACCCCGTTCCAGGAAGGTTTGAGGACCTTCG | |
| | gCCAGCTGGACGCCATATCTAGTTTGCCCAC | |
| | ACCCAGTGACATCTTTGTGTCCTACTCTACTT | |
| | TCCCAGGTTTTGTTTCCTGGAGGGACCCCAA | |
| | GAGTGGCTCCTGGTACGTTGAGACCCTGGA | |
| | CGACATCTTTGAGCAGTGGGCTCACTCTGAA | |
| | GACCTGCAGTCCCTCCTGCTTAGGGTCGCTA | |
| | ATGCTGTTTCGGTGAAAGGGATTTATAAACA | |
| | GATGCCTGGTTGCTTTAATTTCCTCCGGAAA | |
| | AAACTTTTCTTTAAAACATCAGCTAGCAGAG | |
| | CC-(T2A) | |
| Fv-iCASP9 Q328K-T2A | SEQ ID NO: 76 | SEQ ID NO: 77 |
| | (Fv-L)- | VDGFGDVGALESLRGNADLAYILSME |
| | GTCGACGGATTTGGTGATGTCGGTGCTCTTG | PCGHCLIINNVNFCRESGLRTRTGSNI |
| | AGAGTTTGAGGGGAAATGCAGATTTGGCTT | DCEKLRRRFSSLHFMVEVKGDLTAKK |
| | ACATCCTGAGCATGGAGCCCTGTGGCCACTG | MVLALLELARQDHGALDCCVVVILSH |
| | CCTCATTATCAACAATGTGAACTTCTGCCGT | GCQASHLQFPGAVYGTDGCPVSVEKI |
| | GAGTCCGGGCTCCGCACCCGCACTGGCTCCA | VNIFNGTSCPSLGGKPKLFFIQACGGE |
| | ACATCGACTGTGAGAAGTTGCGGCGTCGCTT | QKDHGFEVASTSPEDESPGSNPEPDA |
| | CTCCTCGCTGCATTTCATGGTGGAGGTGAAG | TPFQEGLRTFDkLDAISSLPTPSDIFVS |
| | GGCGACCTGACTGCCAAGAAAATGGTGCTG | YSTFPGFVSWRDPKSGSWYVETLDDI |
| | GCTTTGCTGGAGCTGGCGCGGCAGGACCAC | FEQWAHSEDLQSLLLRVANAVSVKGI |
| | GGTGCTCTGGACTGCTGCGTGGTGGTCATTC | YKQMPGCFNFLRKKLFFKTSASRA- |
| | TCTCTCACGGCTGTCAGGCCAGCCACCTGCA | (T2A) |
| | GTTCCCAGGGGCTGTCTACGGCACAGATGG | |
| | ATGCCCTGTGTCGGTCGAGAAGATTGTGAA | |
| | CATCTTCAATGGGACCAGCTGCCCCAGCCTG | |
| | GGAGGGAAGCCCAAGCTCTTTTTCATCCAGG | |
| | CCTGTGGTGGGGAGCAGAAAGACCATGGGT | |
| | TTGAGGTGGCCTCCACTTCCCCTGAAGACGA | |
| | GTCCCCTGGCAGTAACCCCGAGCCAGATGCC | |
| | ACCCCGTTCCAGGAAGGTTTGAGGACCTTCG | |
| | ACaAGCTGGACGCCATATCTAGTTTGCCCAC | |
| | ACCCAGTGACATCTTTGTGTCCTACTCTACTT | |
| | TCCCAGGTTTTGTTTCCTGGAGGGACCCCAA | |
| | GAGTGGCTCCTGGTACGTTGAGACCCTGGA | |
| | CGACATCTTTGAGCAGTGGGCTCACTCTGAA | |
| | GACCTGCAGTCCCTCCTGCTTAGGGTCGCTA | |
| | ATGCTGTTTCGGTGAAAGGGATTTATAAACA | |
| | GATGCCTGGTTGCTTTAATTTCCTCCGGAAA | |
| | AAACTTTTCTTTAAAACATCAGCTAGCAGAG | |
| | CC-(T2A) | |
| Fv-iCASP9 Q328R-T2A | SEQ ID NO: 78 | SEQ ID NO: 79 |
| | (Fv-L)- | (Fv-L)- |
| | GTCGACGGATTTGGTGATGTCGGTGCTCTTG | VDGFGDVGALESLRGNADLAYILSME |
| | AGAGTTTGAGGGGAAATGCAGATTTGGCTT | PCGHCLIINNVNFCRESGLRTRTGSNI |
| | ACATCCTGAGCATGGAGCCCTGTGGCCACTG | DCEKLRRRFSSLHFMVEVKGDLTAKK |
| | CCTCATTATCAACAATGTGAACTTCTGCCGT | MVLALLELARQDHGALDCCVVVILSH |
| | GAGTCCGGGCTCCGCACCCGCACTGGCTCCA | GCQASHLQFPGAVYGTDGCPVSVEKI |
| | ACATCGACTGTGAGAAGTTGCGGCGTCGCTT | VNIFNGTSCPSLGGKPKLFFIQACGGE |
| | CTCCTCGCTGCATTTCATGGTGGAGGTGAAG | QKDHGFEVASTSPEDESPGSNPEPDA |
| | GGCGACCTGACTGCCAAGAAAATGGTGCTG | TPFQEGLRTFDrLDAISSLPTPSDIFVSY |
| | GCTTTGCTGGAGCTGGCGCGGCAGGACCAC | STFPGFVSWRDPKSGSWYVETLDDIF |
| | GGTGCTCTGGACTGCTGCGTGGTGGTCATTC | EQWAHSEDLQSLLLRVANAVSVKGIY |
| | TCTCTCACGGCTGTCAGGCCAGCCACCTGCA | KQMPGCFNFLRKKLFFKTSASRA- |
| | GTTCCCAGGGGCTGTCTACGGCACAGATGG | (T2A) |
| | ATGCCCTGTGTCGGTCGAGAAGATTGTGAA | |
| | CATCTTCAATGGGACCAGCTGCCCCAGCCTG | |
| | GGAGGGAAGCCCAAGCTCTTTTTCATCCAGG | |
| | CCTGTGGTGGGGAGCAGAAAGACCATGGGT | |
| | TTGAGGTGGCCTCCACTTCCCCTGAAGACGA | |
| | GTCCCCTGGCAGTAACCCCGAGCCAGATGCC | |
| | ACCCCGTTCCAGGAAGGTTTGAGGACCTTCG | |
| | ACagGCTGGACGCCATATCTAGTTTGCCCAC | |
| | ACCCAGTGACATCTTTGTGTCCTACTCTACTT | |
| | TCCCAGGTTTTGTTTCCTGGAGGGACCCCAA | |
| | GAGTGGCTCCTGGTACGTTGAGACCCTGGA | |
| | CGACATCTTTGAGCAGTGGGCTCACTCTGAA | |
| | GACCTGCAGTCCCTCCTGCTTAGGGTCGCTA | |
| | ATGCTGTTTCGGTGAAAGGGATTTATAAACA | |
| | GATGCCTGGTTGCTTTAATTTCCTCCGGAAA | |
| | AAACTTTTCTTTAAAACATCAGCTAGCAGAG | |
| | CC-(T2A) | |
| Fv-iCASP9 L329K-T2A | SEQ ID NO: 80 | SEQ ID NO: 81 |
| | (Fv-L)- | (Fv-L)- |
| | GTCGACGGATTTGGTGATGTCGGTGCTCTTG | VDGFGDVGALESLRGNADLAYILSME |
| | AGAGTTTGAGGGGAAATGCAGATTTGGCTT | PCGHCLIINNVNFCRESGLRTRTGSNI |
| | ACATCCTGAGCATGGAGCCCTGTGGCCACTG | DCEKLRRRFSSLHFMVEVKGDLTAKK |
| | CCTCATTATCAACAATGTGAACTTCTGCCGT | MVLALLELARQDHGALDCCVVVILSH |
| | GAGTCCGGGCTCCGCACCCGCACTGGCTCCA | GCQASHLQFPGAVYGTDGCPVSVEKI |
| | ACATCGACTGTGAGAAGTTGCGGCGTCGCTT | VNIFNGTSCPSLGGKPKLFFIQACGGE |
| | CTCCTCGCTGCATTTCATGGTGGAGGTGAAG | QKDHGFEVASTSPEDESPGSNPEPDA |
| | GGCGACCTGACTGCCAAGAAAATGGTGCTG | TPFQEGLRTFDQkDAISSLPTPSDIFVS |
| | GCTTTGCTGGAGCTGGCGCGGCAGGACCAC | YSTFPGFVSWRDPKSGSWYVETLDDI |
| | GGTGCTCTGGACTGCTGCGTGGTGGTCATTC | FEQWAHSEDLQSLLLRVANAVSVKGI |
| | TCTCTCACGGCTGTCAGGCCAGCCACCTGCA | YKQMPGCFNFLRKKLFFKTSASRA |
| | GTTCCCAGGGGCTGTCTACGGCACAGATGG | |
| | ATGCCCTGTGTCGGTCGAGAAGATTGTGAA | |
| | CATCTTCAATGGGACCAGCTGCCCCAGCCTG | |
| | GGAGGGAAGCCCAAGCTCTTTTTCATCCAGG | |
| | CCTGTGGTGGGGAGCAGAAAGACCATGGGT | |
| | TTGAGGTGGCCTCCACTTCCCCTGAAGACGA | |
| | GTCCCCTGGCAGTAACCCCGAGCCAGATGCC | |
| | ACCCCGTTCCAGGAAGGTTTGAGGACCTTCG | |
| | ACCAGaaGGACGCCATATCTAGTTTGCCCAC | |
| | ACCCAGTGACATCTTTGTGTCCTACTCTACTT | |
| | TCCCAGGTTTTGTTTCCTGGAGGGACCCCAA | |
| | GAGTGGCTCCTGGTACGTTGAGACCCTGGA | |
| | CGACATCTTTGAGCAGTGGGCTCACTCTGAA | |
| | GACCTGCAGTCCCTCCTGCTTAGGGTCGCTA | |
| | ATGCTGTTTCGGTGAAAGGGATTTATAAACA | |
| | GATGCCTGGTTGCTTTAATTTCCTCCGGAAA | |
| | AAACTTTTCTTTAAAACATCAGCTAGCAGAG | |
| | CC | |
| Fv-iCASP9 L329E-T2A | SEQ ID NO: 82 | SEQ ID NO: 83 |
| | (Fv-L)- | (Fv-L)- |
| | GTCGACGGATTTGGTGATGTCGGTGCTCTTG | VDGFGDVGALESLRGNADLAYILSME |
| | AGAGTTTGAGGGGAAATGCAGATTTGGCTT | PCGHCLIINNVNFCRESGLRTRTGSNI |
| | ACATCCTGAGCATGGAGCCCTGTGGCCACTG | DCEKLRRRFSSLHFMVEVKGDLTAKK |
| | CCTCATTATCAACAATGTGAACTTCTGCCGT | MVLALLELARQDHGALDCCVVVILSH |
| | GAGTCCGGGCTCCGCACCCGCACTGGCTCCA | GCQASHLQFPGAVYGTDGCPVSVEKI |
| | ACATCGACTGTGAGAAGTTGCGGCGTCGCTT | VNIFNGTSCPSLGGKPKLFFIQACGGE |
| | CTCCTCGCTGCATTTCATGGTGGAGGTGAAG | QKDHGFEVASTSPEDESPGSNPEPDA |
| | GGCGACCTGACTGCCAAGAAAATGGTGCTG | TPFQEGLRTFDQeDAISSLPTPSDIFVS |
| | GCTTTGCTGGAGCTGGCGCGGCAGGACCAC | YSTFPGFVSWRDPKSGSWYVETLDDI |
| | GGTGCTCTGGACTGCTGCGTGGTGGTCATTC | FEQWAHSEDLQSLLLRVANAVSVKGI |
| | TCTCTCACGGCTGTCAGGCCAGCCACCTGCA | YKQMPGCFNFLRKKLFFKTSASRA- |
| | GTTCCCAGGGGCTGTCTACGGCACAGATGG | (T2A) |
| | ATGCCCTGTGTCGGTCGAGAAGATTGTGAA | |
| | CATCTTCAATGGGACCAGCTGCCCCAGCCTG | |
| | GGAGGGAAGCCCAAGCTCTTTTTCATCCAGG | |
| | CCTGTGGTGGGGAGCAGAAAGACCATGGGT | |
| | TTGAGGTGGCCTCCACTTCCCCTGAAGACGA | |
| | GTCCCCTGGCAGTAACCCCGAGCCAGATGCC | |
| | ACCCCGTTCCAGGAAGGTTTGAGGACCTTCG | |
| | ACCAGgaGGACGCCATATCTAGTTTGCCCAC | |
| | ACCCAGTGACATCTTTGTGTCCTACTCTACTT | |
| | TCCCAGGTTTTGTTTCCTGGAGGGACCCCAA | |
| | GAGTGGCTCCTGGTACGTTGAGACCCTGGA | |
| | CGACATCTTTGAGCAGTGGGCTCACTCTGAA | |
| | GACCTGCAGTCCCTCCTGCTTAGGGTCGCTA | |
| | ATGCTGTTTCGGTGAAAGGGATTTATAAACA | |
| | GATGCCTGGTTGCTTTAATTTCCTCCGGAAA | |
| | AAACTTTTCTTTAAAACATCAGCTAGCAGAG | |
| | CC-(T2A) | |
| Fv-iCASP9 L329G-T2A | SEQ ID NO: 84 | SEQ ID NO: 85 |
| | GTCGACGGATTTGGTGATGTCGGTGCTCTTG | VDGFGDVGALESLRGNADLAYILSME |
| | AGAGTTTGAGGGGAAATGCAGATTTGGCTT | PCGHCLIINNVNFCRESGLRTRTGSNI |
| | ACATCCTGAGCATGGAGCCCTGTGGCCACTG | DCEKLRRRFSSLHFMVEVKGDLTAKK |
| | CCTCATTATCAACAATGTGAACTTCTGCCGT | MVLALLELARQDHGALDCCVVVILSH |
| | GAGTCCGGGCTCCGCACCCGCACTGGCTCCA | GCQASHLQFPGAVYGTDGCPVSVEKI |
| | ACATCGACTGTGAGAAGTTGCGGCGTCGCTT | VNIFNGTSCPSLGGKPKLFFIQACGGE |
| | CTCCTCGCTGCATTTCATGGTGGAGGTGAAG | QKDHGFEVASTSPEDESPGSNPEPDA |
| | GGCGACCTGACTGCCAAGAAAATGGTGCTG | TPFQEGLRTFDQgDAISSLPTPSDIFVS |
| | GCTTTGCTGGAGCTGGCGCGGCAGGACCAC | YSTFPGFVSWRDPKSGSWYVETLDDI |
| | GGTGCTCTGGACTGCTGCGTGGTGGTCATTC | FEQWAHSEDLQSLLLRVANAVSVKGI |
| | TCTCTCACGGCTGTCAGGCCAGCCACCTGCA | YKQMPGCFNFLRKKLFFKTSASRA |
| | GTTCCCAGGGGCTGTCTACGGCACAGATGG | |
| | ATGCCCTGTGTCGGTCGAGAAGATTGTGAA | |
| | CATCTTCAATGGGACCAGCTGCCCCAGCCTG | |
| | GGAGGGAAGCCCAAGCTCTTTTTCATCCAGG | |
| | CCTGTGGTGGGGAGCAGAAAGACCATGGGT | |
| | TTGAGGTGGCCTCCACTTCCCCTGAAGACGA | |
| | GTCCCCTGGCAGTAACCCCGAGCCAGATGCC | |
| | ACCCCGTTCCAGGAAGGTTTGAGGACCTTCG | |
| | ACCAGggcGACGCCATATCTAGTTTGCCCACA | |
| | CCCAGTGACATCTTTGTGTCCTACTCTACTTT | |
| | CCCAGGTTTTGTTTCCTGGAGGGACCCCAAG | |
| | AGTGGCTCCTGGTACGTTGAGACCCTGGAC | |
| | GACATCTTTGAGCAGTGGGCTCACTCTGAAG | |
| | ACCTGCAGTCCCTCCTGCTTAGGGTCGCTAA | |
| | TGCTGTTTCGGTGAAAGGGATTTATAAACAG | |
| | ATGCCTGGTTGCTTTAATTTCCTCCGGAAAA | |
| | AACTTTTCTTTAAAACATCAGCTAGCAGAGC | |
| | C | |
| Fv-L-Caspase9 | SEQ ID NO: 86 | SEQ ID NO: 87 |
| D330A-T2A | (Fv-L)- | (Fv-L)- |
| | GTCGACGGATTTGGTGATGTCGGTGCTCTT | GVDGFGDVGALESLRGNADLAYILSME |
| | AGAGTTTGAGGGGAAATGCAGATTTGGCTT | PCGHCLIINNVNFCRESGLRTRTGSNI |
| | ACATCCTGAGCATGGAGCCCTGTGGCCACTG | DCEKLRRRFSS |
| | CCTCATTATCAACAATGTGAACTTCTGCCGT | LHFMVEVKGDLTAKKMVLALLELAR |
| | GAGTCCGGGCTCCGCACCCGCACTGGCTCCA | QDHGALDCCVVVILSHGCQASHLQF |
| | ACATCGACTGTGAGAAGTTGCGGCGTCGCTT | PGAVYGTDGC |
| | CTCCTCGCTGCATTTCATGGTGGAGGTGAAG | PVSVEKIVNIFNGTSCPSLGGKPKLFFI |
| | GGCGACCTGACTGCCAAGAAAATGGTGCTG | QACGGEQKDHGFEVASTSPEDESPG |
| | GCTTTGCTGGAGCTGGCGCGGCAGGACCAC | SNPEPDA |
| | GGTGCTCTGGACTGCTGCGTGGTGGTCATTC | TPFQEGLRTFDQLaAISSLPTPSDIFVS |
| | TCTCTCACGGCTGTCAGGCCAGCCACCTGCA | YSTFPGFVSWRDPKSGSWYVETLDDI |
| | GTTCCCAGGGGCTGTCTACGGCACAGATGG | FEQWAH |
| | ATGCCCTGTGTCGGTCGAGAAGATTGTGAA | SEDLQSLLLRVANAVSVKGIYKQMPG |
| | CATCTTCAATGGGACCAGCTGCCCCAGCCTG | CFNFLRKKLFFKTSASRA-(T2A) |
| | GGAGGGAAGCCCAAGCTCTTTTTCATCCAGG | |
| | CCTGTGGTGGGGAGCAGAAAGACCATGGGT | |
| | TTGAGGTGGCCTCCACTTCCCCTGAAGACGA | |
| | GTCCCCTGGCAGTAACCCCGAGCCAGATGCC | |
| | ACCCCGTTCCAGGAAGGTTTGAGGACCTTCG | |
| | ACCAGCTGGcCGCCATATCTAGTTTGCCCAC | |
| | ACCCAGTGACATCTTTGTGTCCTACTCTACTT | |
| | TCCCAGGTTTTGTTTCCTGGAGGGACCCCAA | |
| | GAGTGGCTCCTGGTACGTTGAGACCCTGGA | |
| | CGACATCTTTGAGCAGTGGGCTCACTCTGAA | |
| | GACCTGCAGTCCCTCCTGCTTAGGGTCGCTA | |
| | ATGCTGTTTCGGTGAAAGGGATTTATAAACA | |
| | GATGCCTGGTTGCTTTAATTTCCTCCGGAAA | |
| | AAACTTTTCTTTAAAACATCAGCTAGCAGAG | |
| | CC-(T2A) | |
| Fv-L-Caspase9 | SEQ ID NO: 88 | SEQ ID NO: 89 |
| D330E-T2A | (Fv-L)- | (Fv-L)- |
| | GTCGACGGATTTGGTGATGTCGGTGCTCTTG | VDGFGDVGALESLRGNADLAYILSME |
| | AGAGTTTGAGGGGAAATGCAGATTTGGCTT | PCGHCLIINNVNFCRESGLRTRTGSNI |
| | ACATCCTGAGCATGGAGCCCTGTGGCCACTG | DCEKLRRRFSS |
| | CCTCATTATCAACAATGTGAACTTCTGCCGT | LHFMVEVKGDLTAKKMVLALLELAR |
| | GAGTCCGGGCTCCGCACCCGCACTGGCTCCA | QDHGALDCCVVVILSHGCQASHLQF |
| | ACATCGACTGTGAGAAGTTGCGGCGTCGCTT | PGAVYGTDGC |
| | CTCCTCGCTGCATTTCATGGTGGAGGTGAAG | PVSVEKIVNIFNGTSCPSLGGKPKLFFI |
| | GGCGACCTGACTGCCAAGAAAATGGTGCTG | QACGGEQKDHGFEVASTSPEDESPG |
| | GCTTTGCTGGAGCTGGCGCGGCAGGACCAC | SNPEPDA |
| | GGTGCTCTGGACTGCTGCGTGGTGGTCATTC | TPFQEGLRTFDQLeAISSLPTPSDIFVS |
| | TCTCTCACGGCTGTCAGGCCAGCCACCTGCA | YSTFPGFVSWRDPKSGSWYVETLDDI |
| | GTTCCCAGGGGCTGTCTACGGCACAGATGG | FEQWAH |
| | ATGCCCTGTGTCGGTCGAGAAGATTGTGAA | SEDLQSLLLRVANAVSVKGIYKQMPG |
| | CATCTTCAATGGGACCAGCTGCCCCAGCCTG | CFNFLRKKLFFKTSASRA-(T2A) |
| | GGAGGGAAGCCCAAGCTCTTTTTCATCCAGG | |
| | CCTGTGGTGGGGAGCAGAAAGACCATGGGT | |
| | TTGAGGTGGCCTCCACTTCCCCTGAAGACGA | |
| | GTCCCCTGGCAGTAACCCCGAGCCAGATGCC | |
| | ACCCCGTTCCAGGAAGGTTTGAGGACCTTCG | |
| | ACCAGCTGGcCGCCATATCTAGTTTGCCCAC | |
| | ACCCAGTGACATCTTTGTGTCCTACTCTACTT | |
| | TCCCAGGTTTTGTTTCCTGGAGGGACCCCAA | |
| | GAGTGGCTCCTGGTACGTTGAGACCCTGGA | |
| | CGACATCTTTGAGCAGTGGGCTCACTCTGAA | |
| | GACCTGCAGTCCCTCCTGCTTAGGGTCGCTA | |
| | ATGCTGTTTCGGTGAAAGGGATTTATAAACA | |
| | GATGCCTGGTTGCTTTAATTTCCTCCGGAAA | |
| | AAACTTTTCTTTAAAACATCAGCTAGCAGAG | |
| | CC-(T2A) | |
| Fv-L-Caspase9 | SEQ ID NO: 90 | SEQ ID NO: 91 |
| D330N-T2A | (Fv-L)- | (Fv-L)- |
| | GTCGACGGATTTGGTGATGTCGGTGCTCTTG | VDGFGDVGALESLRGNADLAYILSME |
| | AGAGTTTGAGGGGAAATGCAGATTTGGCTT | PCGHCLIINNVNFCRESGLRTRTGSNI |
| | ACATCCTGAGCATGGAGCCCTGTGGCCACTG | DCEKLRRRFSS |
| | CCTCATTATCAACAATGTGAACTTCTGCCGT | LHFMVEVKGDLTAKKMVLALLELAR |
| | GAGTCCGGGCTCCGCACCCGCACTGGCTCCA | QDHGALDCCVVVILSHGCQASHLQF |
| | ACATCGACTGTGAGAAGTTGCGGCGTCGCTT | PGAVYGTDGC |
| | CTCCTCGCTGCATTTCATGGTGGAGGTGAAG | PVSVEKIVNIFNGTSCPSLGGKPKLFFI |
| | GGCGACCTGACTGCCAAGAAAATGGTGCTG | QACGGEQKDHGFEVASTSPEDESPG |
| | GCTTTGCTGGAGCTGGCGCGGCAGGACCAC | SNPEPDA |
| | GGTGCTCTGGACTGCTGCGTGGTGGTCATTC | TPFQEGLRTFDQLnAISSLPTPSDIFVS |
| | TCTCTCACGGCTGTCAGGCCAGCCACCTGCA | YSTFPGFVSWRDPKSGSWYVETLDDI |
| | GTTCCCAGGGGCTGTCTACGGCACAGATGG | FEQWAH |
| | ATGCCCTGTGTCGGTCGAGAAGATTGTGAA | SEDLQSLLLRVANAVSVKGIYKQMPG |
| | CATCTTCAATGGGACCAGCTGCCCCAGCCTG | CFNFLRKKLFFKTSASRA-(T2A) |
| | GGAGGGAAGCCCAAGCTCTTTTTCATCCAGG | |
| | CCTGTGGTGGGGAGCAGAAAGACCATGGGT | |
| | TTGAGGTGGCCTCCACTTCCCCTGAAGACGA | |
| | GTCCCCTGGCAGTAACCCCGAGCCAGATGCC | |
| | ACCCCGTTCCAGGAAGGTTTGAGGACCTTCG | |
| | ACCAGCTGGcCGCCATATCTAGTTTGCCCAC | |
| | ACCCAGTGACATCTTTGTGTCCTACTCTACTT | |
| | TCCCAGGTTTTGTTTCCTGGAGGGACCCCAA | |
| | GAGTGGCTCCTGGTACGTTGAGACCCTGGA | |
| | CGACATCTTTGAGCAGTGGGCTCACTCTGAA | |
| | GACCTGCAGTCCCTCCTGCTTAGGGTCGCTA | |
| | ATGCTGTTTCGGTGAAAGGGATTTATAAACA | |
| | GATGCCTGGTTGCTTTAATTTCCTCCGGAAA | |
| | AAACTTTTCTTTAAAACATCAGCTAGCAGAG | |
| | CC-(T2A) | |
| Fv-L-Caspase9 | SEQ ID NO: 92 | SEQ ID NO: 93 |
| D330V-T2A | (Fv-L)- | (Fv-L)- |
| | GTCGACGGATTTGGTGATGTCGGTGCTCTTG | VDGFGDVGALESLRGNADLAYILSME |
| | AGAGTTTGAGGGGAAATGCAGATTTGGCTT | PCGHCLIINNVNFCRESGLRTRTGSNI |
| | ACATCCTGAGCATGGAGCCCTGTGGCCACTG | DCEKLRRRFSS |
| | CCTCATTATCAACAATGTGAACTTCTGCCGT | LHFMVEVKGDLTAKKMVLALLELAR |
| | GAGTCCGGGCTCCGCACCCGCACTGGCTCCA | QDHGALDCCVVVILSHGCQASHLQF |
| | ACATCGACTGTGAGAAGTTGCGGCGTCGCTT | PGAVYGTDGC |
| | CTCCTCGCTGCATTTCATGGTGGAGGTGAAG | PVSVEKIVNIFNGTSCPSLGGKPKLFFI |
| | GGCGACCTGACTGCCAAGAAAATGGTGCTG | QACGGEQKDHGFEVASTSPEDESPG |
| | GCTTTGCTGGAGCTGGCGCGGCAGGACCAC | SNPEPDA |
| | GGTGCTCTGGACTGCTGCGTGGTGGTCATTC | TPFQEGLRTFDQLvAISSLPTPSDIFVS |
| | TCTCTCACGGCTGTCAGGCCAGCCACCTGCA | YSTFPGFVSWRDPKSGSWYVETLDDI |
| | GTTCCCAGGGGCTGTCTACGGCACAGATGG | FEQWAH |
| | ATGCCCTGTGTCGGTCGAGAAGATTGTGAA | SEDLQSLLLRVANAVSVKGIYKQMPG |
| | CATCTTCAATGGGACCAGCTGCCCCAGCCTG | CFNFLRKKLFFKTSASRA-(T2A) |
| | GGAGGGAAGCCCAAGCTCTTTTTCATCCAGG | |
| | CCTGTGGTGGGGAGCAGAAAGACCATGGGT | |
| | TTGAGGTGGCCTCCACTTCCCCTGAAGACGA | |
| | GTCCCCTGGCAGTAACCCCGAGCCAGATGCC | |
| | ACCCCGTTCCAGGAAGGTTTGAGGACCTTCG | |
| | ACCAGCTGGcCGCCATATCTAGTTTGCCCAC | |
| | ACCCAGTGACATCTTTGTGTCCTACTCTACTT | |
| | TCCCAGGTTTTGTTTCCTGGAGGGACCCCAA | |
| | GAGTGGCTCCTGGTACGTTGAGACCCTGGA | |
| | CGACATCTTTGAGCAGTGGGCTCACTCTGAA | |
| | GACCTGCAGTCCCTCCTGCTTAGGGTCGCTA | |
| | ATGCTGTTTCGGTGAAAGGGATTTATAAACA | |
| | GATGCCTGGTTGCTTTAATTTCCTCCGGAAA | |
| | AAACTTTTCTTTAAAACATCAGCTAGCAGAG | |
| | CC-(T2A) | |
| Fv-L-Caspase9 | SEQ ID NO: 94 | SEQ ID NO: 95 |
| D330G-T2A | (Fv-L)- | (Fv-L)- |
| | GTCGACGGATTTGGTGATGTCGGTGCTCTTG | VDGFGDVGALESLRGNADLAYILSME |
| | AGAGTTTGAGGGGAAATGCAGATTTGGCTT | PCGHCLIINNVNFCRESGLRTRTGSNI |
| | ACATCCTGAGCATGGAGCCCTGTGGCCACTG | DCEKLRRRFSS |
| | CCTCATTATCAACAATGTGAACTTCTGCCGT | LHFMVEVKGDLTAKKMVLALLELAR |
| | GAGTCCGGGCTCCGCACCCGCACTGGCTCCA | QDHGALDCCVVVILSHGCQASHLQF |
| | ACATCGACTGTGAGAAGTTGCGGCGTCGCTT | PGAVYGTDGC |
| | CTCCTCGCTGCATTTCATGGTGGAGGTGAAG | PVSVEKIVNIFNGTSCPSLGGKPKLFFI |
| | GGCGACCTGACTGCCAAGAAAATGGTGCTG | QACGGEQKDHGFEVASTSPEDESPG |
| | GCTTTGCTGGAGCTGGCGCGGCAGGACCAC | SNPEPDA |
| | GGTGCTCTGGACTGCTGCGTGGTGGTCATTC | TPFQEGLRTFDQLgAISSLPTPSDIFVS |
| | TCTCTCACGGCTGTCAGGCCAGCCACCTGCA | YSTFPGFVSWRDPKSGSWYVETLDDI |
| | GTTCCCAGGGGCTGTCTACGGCACAGATGG | FEQWAH |
| | ATGCCCTGTGTCGGTCGAGAAGATTGTGAA | SEDLQSLLLRVANAVSVKGIYKQMPG |
| | CATCTTCAATGGGACCAGCTGCCCCAGCCTG | CFNFLRKKLFFKTSASRA-(T2A) |
| | GGAGGGAAGCCCAAGCTCTTTTTCATCCAGG | |
| | CCTGTGGTGGGGAGCAGAAAGACCATGGGT | |
| | TTGAGGTGGCCTCCACTTCCCCTGAAGACGA | |
| | GTCCCCTGGCAGTAACCCCGAGCCAGATGCC | |
| | ACCCCGTTCCAGGAAGGTTTGAGGACCTTCG | |
| | ACCAGCTGGcCGCCATATCTAGTTTGCCCAC | |
| | ACCCAGTGACATCTTTGTGTCCTACTCTACTT | |
| | TCCCAGGTTTTGTTTCCTGGAGGGACCCCAA | |
| | GAGTGGCTCCTGGTACGTTGAGACCCTGGA | |
| | CGACATCTTTGAGCAGTGGGCTCACTCTGAA | |
| | GACCTGCAGTCCCTCCTGCTTAGGGTCGCTA | |
| | ATGCTGTTTCGGTGAAAGGGATTTATAAACA | |
| | GATGCCTGGTTGCTTTAATTTCCTCCGGAAA | |
| | AAACTTTTCTTTAAAACATCAGCTAGCAGAG | |
| | CC-(T2A) | |
| Fv-L-Caspase9 D330S- | SEQ ID NO: 96 | SEQ ID NO: 97 |
| T2A | (Fv-L)- | (Fv-L)- |
| | GTCGACGGATTTGGTGATGTCGGTGCTCTTG | VDGFGDVGALESLRGNADLAYILSME |
| | AGAGTTTGAGGGGAAATGCAGATTTGGCTT | PCGHCLIINNVNFCRESGLRTRTGSNI |
| | ACATCCTGAGCATGGAGCCCTGTGGCCACTG | DCEKLRRRFSS |
| | CCTCATTATCAACAATGTGAACTTCTGCCGT | LHFMVEVKGDLTAKKMVLALLELAR |
| | GAGTCCGGGCTCCGCACCCGCACTGGCTCCA | QDHGALDCCVVVILSHGCQASHLQF |
| | ACATCGACTGTGAGAAGTTGCGGCGTCGCTT | PGAVYGTDGC |
| | CTCCTCGCTGCATTTCATGGTGGAGGTGAAG | PVSVEKIVNIFNGTSCPSLGGKPKLFFI |
| | GGCGACCTGACTGCCAAGAAAATGGTGCTG | QACGGEQKDHGFEVASTSPEDESPG |
| | GCTTTGCTGGAGCTGGCGCGGCAGGACCAC | SNPEPDA |
| | GGTGCTCTGGACTGCTGCGTGGTGGTCATTC | TPFQEGLRTFDQLsAISSLPTPSDIFVS |
| | TCTCTCACGGCTGTCAGGCCAGCCACCTGCA | YSTFPGFVSWRDPKSGSWYVETLDDI |
| | GTTCCCAGGGGCTGTCTACGGCACAGATGG | FEQWAH |
| | ATGCCCTGTGTCGGTCGAGAAGATTGTGAA | SEDLQSLLLRVANAVSVKGIYKQMPG |
| | CATCTTCAATGGGACCAGCTGCCCCAGCCTG | CFNFLRKKLFFKTSASRA-(T2A) |
| | GGAGGGAAGCCCAAGCTCTTTTTCATCCAGG | |
| | CCTGTGGTGGGGAGCAGAAAGACCATGGGT | |
| | TTGAGGTGGCCTCCACTTCCCCTGAAGACGA | |
| | GTCCCCTGGCAGTAACCCCGAGCCAGATGCC | |
| | ACCCCGTTCCAGGAAGGTTTGAGGACCTTCG | |
| | ACCAGCTGGcCGCCATATCTAGTTTGCCCAC | |
| | ACCCAGTGACATCTTTGTGTCCTACTCTACTT | |
| | TCCCAGGTTTTGTTTCCTGGAGGGACCCCAA | |
| | GAGTGGCTCCTGGTACGTTGAGACCCTGGA | |
| | CGACATCTTTGAGCAGTGGGCTCACTCTGAA | |
| | GACCTGCAGTCCCTCCTGCTTAGGGTCGCTA | |
| | ATGCTGTTTCGGTGAAAGGGATTTATAAACA | |
| | GATGCCTGGTTGCTTTAATTTCCTCCGGAAA | |
| | AAACTTTTCTTTAAAACATCAGCTAGCAGAG | |
| | CC-(T2A) | |
| Fv-iCASP9 A331K-T2A | SEQ ID NO: 98 | SEQ ID NO: 99 |
| | (Fv-L)- | (Fv-L)- |
| | GTCGACGGATTTGGTGATGTCGGTGCTCTTG | VDGFGDVGALESLRGNADLAYILSME |
| | AGAGTTTGAGGGGAAATGCAGATTTGGCTT | PCGHCLIINNVNFCRESGLRTRTGSNI |
| | ACATCCTGAGCATGGAGCCCTGTGGCCACTG | DCEKLRRRFSSLHFMVEVKGDLTAKK |
| | CCTCATTATCAACAATGTGAACTTCTGCCGT | MVLALLELARQDHGALDCCVVVILSH |
| | GAGTCCGGGCTCCGCACCCGCACTGGCTCCA | GCQASHLQFPGAVYGTDGCPVSVEKI |
| | ACATCGACTGTGAGAAGTTGCGGCGTCGCTT | VNIFNGTSCPSLGGKPKLFFIQACGGE |
| | CTCCTCGCTGCATTTCATGGTGGAGGTGAAG | QKDHGFEVASTSPEDESPGSNPEPDA |
| | GGCGACCTGACTGCCAAGAAAATGGTGCTG | TPFQEGLRTFDQLDkISSLPTPSDIFVS |
| | GCTTTGCTGGAGCTGGCGCGGCAGGACCAC | YSTFPGFVSWRDPKSGSWYVETLDDI |
| | GGTGCTCTGGACTGCTGCGTGGTGGTCATTC | FEQWAHSEDLQSLLLRVANAVSVKGI |
| | TCTCTCACGGCTGTCAGGCCAGCCACCTGCA | YKQMPGCFNFLRKKLFFKTSASRA- |
| | GTTCCCAGGGGCTGTCTACGGCACAGATGG | (T2A) |
| | ATGCCCTGTGTCGGTCGAGAAGATTGTGAA | |
| | CATCTTCAATGGGACCAGCTGCCCCAGCCTG | |
| | GGAGGGAAGCCCAAGCTCTTTTTCATCCAGG | |
| | CCTGTGGTGGGGAGCAGAAAGACCATGGGT | |
| | TTGAGGTGGCCTCCACTTCCCCTGAAGACGA | |
| | GTCCCCTGGCAGTAACCCCGAGCCAGATGCC | |
| | ACCCCGTTCCAGGAAGGTTTGAGGACCTTCG | |
| | ACCAGCTGGACaagATATCTAGTTTGCCCAC | |
| | ACCCAGTGACATCTTTGTGTCCTACTCTACTT | |
| | TCCCAGGTTTTGTTTCCTGGAGGGACCCCAA | |
| | GAGTGGCTCCTGGTACGTTGAGACCCTGGA | |
| | CGACATCTTTGAGCAGTGGGCTCACTCTGAA | |
| | GACCTGCAGTCCCTCCTGCTTAGGGTCGCTA | |
| | ATGCTGTTTCGGTGAAAGGGATTTATAAACA | |
| | GATGCCTGGTTGCTTTAATTTCCTCCGGAAA | |
| | AAACTTTTCTTTAAAACATCAGCTAGCAGAG | |
| | CC-(T2A) | |
| Fv-L-iCaspase9 | SEQ ID NO: 100 | SEQ ID NO: 101 |
| F404Y-T2A | (Fv-L)- | (Fv-L)- |
| | GTCGACGGATTTGGTGATGTCGGTGCTCTTG | VDGFGDVGALESLRGNADLAYILSME |
| | AGAGTTTGAGGGGAAATGCAGATTTGGCTT | PCGHCLIINNVNFCRESGLRTRTGSNI |
| | ACATCCTGAGCATGGAGCCCTGTGGCCACTG | DCEKLRRRFSS |
| | CCTCATTATCAACAATGTGAACTTCTGCCGT | LHFMVEVKGDLTAKKMVLALLELAR |
| | GAGTCCGGGCTCCGCACCCGCACTGGCTCCA | QDHGALDCCVVVILSHGCQASHLQF |
| | ACATCGACTGTGAGAAGTTGCGGCGTCGCTT | PGAVYGTDGC |
| | CTCCTCGCTGCATTTCATGGTGGAGGTGAAG | PVSVEKIVNIFNGTSCPSLGGKPKLFFI |
| | GGCGACCTGACTGCCAAGAAAATGGTGCTG | QACGG EQKDHGFEVASTSPEDESPG |
| | GCTTTGCTGGAGCTGGCGCGGCAGGACCAC | SNPEPDA |
| | GGTGCTCTGGACTGCTGCGTGGTGGTCATTC | TPFQEGLRTFDQLDAISSLPTPSDIFVS |
| | TCTCTCACGGCTGTCAGGCCAGCCACCTGCA | YSTFPGFVSWRDPKSGSWYVETLDDI |
| | GTTCCCAGGGGCTGTCTACGGCACAGATGG | FEQWAH |
| | ATGCCCTGTGTCGGTCGAGAAGATTGTGAA | SEDLQSLLLRVANAVSVKGIYKQMPG |
| | CATCTTCAATGGGACCAGCTGCCCCAGCCTG | CyNFLRKKLFFKTSASRA-(T2A) |
| | GGAGGGAAGCCCAAGCTCTTTTTCATCCAGG | |
| | CCTGTGGTGGGGAGCAGAAAGACCATGGGT | |
| | TTGAGGTGGCCTCCACTTCCCCTGAAGACGA | |
| | GTCCCCTGGCAGTAACCCCGAGCCAGATGCC | |
| | ACCCCGTTCCAGGAAGGTTTGAGGACCTTCG | |
| | ACCAGCTGGACGCCATATCTAGTTTGCCCAC | |
| | ACCCAGTGACATCTTTGTGTCCTACTCTACTT | |
| | TCCCAGGTTTTGTTTCCTGGAGGGACCCCAA | |
| | GAGTGGCTCCTGGTACGTTGAGACCCTGGA | |
| | CGACATCTTTGAGCAGTGGGCTCACTCTGAA | |
| | GACCTGCAGTCCCTCCTGCTTAGGGTCGCTA | |
| | ATGCTGTTTCGGTGAAAGGGATTTATAAACA | |
| | GATGCCTGGTTGCTaTAATTTCCTCCGGAAA | |
| | AAACTTTTCTTTAAAACATCAGCTAGCAGAG | |
| | CC-(T2A) | |
| Fv-L-iCASP9 F404W- | SEQ ID NO: 102 | SEQ ID NO: 103 |
| T2A | (Fv-L)- | (Fv-L)- |
| | GTCGACGGATTTGGTGATGTCGGTGCTCTTG | VDGFGDVGALESLRGNADLAYILSME |
| | AGAGTTTGAGGGGAAATGCAGATTTGGCTT | PCGHCLIINNVNFCRESGLRTRTGSNI |
| | ACATCCTGAGCATGGAGCCCTGTGGCCACTG | DCEKLRRRFSS |
| | CCTCATTATCAACAATGTGAACTTCTGCCGT | LHFMVEVKGDLTAKKMVLALLELAR |
| | GAGTCCGGGCTCCGCACCCGCACTGGCTCCA | QDHGALDCCVVVILSHGCQASHLQF |
| | ACATCGACTGTGAGAAGTTGCGGCGTCGCTT | PGAVYGTDGC |
| | CTCCTCGCTGCATTTCATGGTGGAGGTGAAG | PVSVEKIVNIFNGTSCPSLGGKPKLFFI |
| | GGCGACCTGACTGCCAAGAAAATGGTGCTG | QACGGEQKDHGFEVASTSPEDESPG |
| | GCTTTGCTGGAGCTGGCGCGGCAGGACCAC | SNPEPDA |
| | GGTGCTCTGGACTGCTGCGTGGTGGTCATTC | TPFQEGLRTFDQLDAISSLPTPSDIFVS |
| | TCTCTCACGGCTGTCAGGCCAGCCACCTGCA | YSTFPGFVSWRDPKSGSWYVETLDDI |
| | GTTCCCAGGGGCTGTCTACGGCACAGATGG | FEQWAH |
| | ATGCCCTGTGTCGGTCGAGAAGATTGTGAA | SEDLQSLLLRVANAVSVKGIYKQMPG |
| | CATCTTCAATGGGACCAGCTGCCCCAGCCTG | CwNFLRKKLFFKTSASRA-(T2A) |
| | GGAGGGAAGCCCAAGCTCTTTTTCATCCAGG | |
| | CCTGTGGTGGGGAGCAGAAAGACCATGGGT | |
| | TTGAGGTGGCCTCCACTTCCCCTGAAGACGA | |
| | GTCCCCTGGCAGTAACCCCGAGCCAGATGCC | |
| | ACCCCGTTCCAGGAAGGTTTGAGGACCTTCG | |
| | ACCAGCTGGACGCCATATCTAGTTTGCCCAC | |
| | ACCCAGTGACATCTTTGTGTCCTACTCTACTT | |
| | TCCCAGGTTTTGTTTCCTGGAGGGACCCCAA | |
| | GAGTGGCTCCTGGTACGTTGAGACCCTGGA | |
| | CGACATCTTTGAGCAGTGGGCTCACTCTGAA | |
| | GACCTGCAGTCCCTCCTGCTTAGGGTCGCTA | |
| | ATGCTGTTTCGGTGAAAGGGATTTATAAACA | |
| | GATGCCTGGTTGCTggAATTTCCTCCGGAAA | |
| | AAACTTTTCTTTAAAACATCAGCTAGCAGAG | |
| | CC-(T2A) | |
| Fv-L-iCaspase9 | SEQ ID NO: 104 | SEQ ID NO: 105 |
| N405Q-T2A | (Fv-L)- | (Fv-L)- |
| | GTCGACGGATTTGGTGATGTCGGTGCTCTTG | VDGFGDVGALESLRGNADLAYILSME |
| | AGAGTTTGAGGGGAAATGCAGATTTGGCTT | PCGHCLIINNVNFCRESGLRTRTGSNI |
| | ACATCCTGAGCATGGAGCCCTGTGGCCACTG | DCEKLRRRFSS |
| | CCTCATTATCAACAATGTGAACTTCTGCCGT | LHFMVEVKGDLTAKKMVLALLELAR |
| | GAGTCCGGGCTCCGCACCCGCACTGGCTCCA | QDHGALDCCVVVILSHGCQASHLQF |
| | ACATCGACTGTGAGAAGTTGCGGCGTCGCTT | PGAVYGTDGC |
| | CTCCTCGCTGCATTTCATGGTGGAGGTGAAG | PVSVEKIVNIFNGTSCPSLGGKPKLFFI |
| | GGCGACCTGACTGCCAAGAAAATGGTGCTG | QACGGEQKDHGFEVASTSPEDESPG |
| | GCTTTGCTGGAGCTGGCGCGGCAGGACCAC | SNPEPDA |
| | GGTGCTCTGGACTGCTGCGTGGTGGTCATTC | TPFQEGLRTFDQLDAISSLPTPSDIFVS |
| | TCTCTCACGGCTGTCAGGCCAGCCACCTGCA | YSTFPGFVSWRDPKSGSWYVETLDDI |
| | GTTCCCAGGGGCTGTCTACGGCACAGATGG | FEQWAH |
| | ATGCCCTGTGTCGGTCGAGAAGATTGTGAA | SEDLQSLLLRVANAVSVKGIYKQMPG |
| | CATCTTCAATGGGACCAGCTGCCCCAGCCTG | CFqFLRKKLFFKTSASRA-(T2A) |
| | GGAGGGAAGCCCAAGCTCTTTTTCATCCAGG | |
| | CCTGTGGTGGGGAGCAGAAAGACCATGGGT | |
| | TTGAGGTGGCCTCCACTTCCCCTGAAGACGA | |
| | GTCCCCTGGCAGTAACCCCGAGCCAGATGCC | |
| | ACCCCGTTCCAGGAAGGTTTGAGGACCTTCG | |
| | ACCAGCTGGACGCCATATCTAGTTTGCCCAC | |
| | ACCCAGTGACATCTTTGTGTCCTACTCTACTT | |
| | TCCCAGGTTTTGTTTCCTGGAGGGACCCCAA | |
| | GAGTGGCTCCTGGTACGTTGAGACCCTGGA | |
| | CGACATCTTTGAGCAGTGGGCTCACTCTGAA | |
| | GACCTGCAGTCCCTCCTGCTTAGGGTCGCTA | |
| | ATGCTGTTTCGGTGAAAGGGATTTATAAACA | |
| | GATGCCTGGTTGCTTTcagTTCCTCCGGAAAA | |
| | AACTTTTCTTTAAAACATCAGCTAGCAGAGC | |
| | C-(T2A) | |
| Fv-L-iCaspase9 | SEQ ID NO: 106 | SEQ ID NO: 107 |
| N405Q codon | -(Fv-L)- | (Fv-L)- |
| optimized-T2A | GTGGACGGGTTTGGAGATGTGGGAGCCCTG | VDGFGDVGALESLRGNADLAYILSME |
| | GAATCCCTGCGGGGCAATGCCGATCTGGCTT | PCGHCLIINNVNFCRESGLRTRTGSNI |
| | ACATCCTGTCTATGGAGCCTTGCGGCCACTG | DCEKLRRRFSS |
| | TCTGATCATTAACAATGTGAACTTCTGCAGA | LHFMVEVKGDLTAKKMVLALLELAR |
| | GAGAGCGGGCTGCGGACCAGAACAGGATC | QDHGALDCCVVVILSHGCQASHLQF |
| | CAATATTGACTGTGAAAAGCTGCGGAGAAG | PGAVYGTDGC |
| | GTTCTCTAGTCTGCACTTTATGGTCGAGGTG | PVSVEKIVNIFNGTSCPSLGGKPKLFFI |
| | AAAGGCGATCTGACCGCTAAGAAAATGGTG | QACGGEQKDHGFEVASTSPEDESPG |
| | CTGGCCCTGCTGGAACTGGCTCGGCAGGAC | SNPEPDA |
| | CATGGGGCACTGGATTGCTGCGTGGTCGTG | TPFQEGLRTFDQLDAISSLPTPSDIFVS |
| | ATCCTGAGTCACGGCTGCCAGGCTTCACATC | YSTFPGFVSWRDPKSGSWYVETLDDI |
| | TGCAGTTCCCTGGGGCAGTCTATGGAACTGA | FEQWAH |
| | CGGCTGTCCAGTCAGCGTGGAGAAGATCGT | SEDLQSLLLRVANAVSVKGIYKQMPG |
| | GAACATCTTCAACGGCACCTCTTGCCCAAGT | CFqFLRKKLFFKTSASRA-(T2A) |
| | CTGGGCGGGAAGCCCAAACTGTTCTTTATTC | |
| | AGGCCTGTGGAGGCGAGCAGAAAGATCAC | |
| | GGCTTCGAAGTGGCTAGCACCTCCCCCGAG | |
| | GACGAATCACCTGGAAGCAACCCTGAGCCA | |
| | GATGCAACCCCCTTCCAGGAAGGCCTGAGG | |
| | ACATTTGACCAGCTGGATGCCATCTCAAGCC | |
| | TGCCCACACCTTCTGACATTTTCGTCTCTTAC | |
| | AGTACTTTCCCTGGATTTGTGAGCTGGCGCG | |
| | ATCCAAAGTCAGGCAGCTGGTACGTGGAGA | |
| | CACTGGACGATATCTTTGAGCAGTGGGCCCA | |
| | TTCTGAAGACCTGCAGAGTCTGCTGCTGCGA | |
| | GTGGCCAATGCTGTCTCTGTGAAGGGGATCT | |
| | ACAAACAGATGCCAGGATGCTTCcagTTTCT | |
| | GAGAAAGAAACTGTTCTTTAAGACCTCCGCA | |
| | TCTAGGGCC-(T2A) | |
| Fv-iCASP9 F406L-T2A | SEQ ID NO: 108 | SEQ ID NO: 109 |
| | (Fv-L)- | (Fv-L)- |
| | GTCGACGGATTTGGTGATGTCGGTGCTCTTG | VDGFGDVGALESLRGNADLAYILSME |
| | AGAGTTTGAGGGGAAATGCAGATTTGGCTT | PCGHCLIINNVNFCRESGLRTRTGSNI |
| | ACATCCTGAGCATGGAGCCCTGTGGCCACTG | DCEKLRRRFSSLHFMVEVKGDLTAKK |
| | CCTCATTATCAACAATGTGAACTTCTGCCGT | MVLALLELARQDHGALDCCVVVILSH |
| | GAGTCCGGGCTCCGCACCCGCACTGGCTCCA | GCQASHLQFPGAVYGTDGCPVSVEKI |
| | ACATCGACTGTGAGAAGTTGCGGCGTCGCTT | VNIFNGTSCPSLGGKPKLFFIQACGGE |
| | CTCCTCGCTGCATTTCATGGTGGAGGTGAAG | QKDHGFEVASTSPEDESPGSNPEPDA |
| | GGCGACCTGACTGCCAAGAAAATGGTGCTG | TPFQEGLRTFDQLDAISSLPTPSDIFVS |
| | GCTTTGCTGGAGCTGGCGCGGCAGGACCAC | YSTFPGFVSWRDPKSGSWYVETLDDI |
| | GGTGCTCTGGACTGCTGCGTGGTGGTCATTC | FEQWAHSEDLQSLLLRVANAVSVKGI |
| | TCTCTCACGGCTGTCAGGCCAGCCACCTGCA | YKQMPGCFNLLRKKLFFKTSASRA- |
| | GTTCCCAGGGGCTGTCTACGGCACAGATGG | (T2A) |
| | ATGCCCTGTGTCGGTCGAGAAGATTGTGAA | |
| | CATCTTCAATGGGACCAGCTGCCCCAGCCTG | |
| | GGAGGGAAGCCCAAGCTCTTTTTCATCCAGG | |
| | CCTGTGGTGGGGAGCAGAAAGACCATGGGT | |
| | TTGAGGTGGCCTCCACTTCCCCTGAAGACGA | |
| | GTCCCCTGGCAGTAACCCCGAGCCAGATGCC | |
| | ACCCCGTTCCAGGAAGGTTTGAGGACCTTCG | |
| | ACCAGCTGGACGCCATATCTAGTTTGCCCAC | |
| | ACCCAGTGACATCTTTGTGTCCTACTCTACTT | |
| | TCCCAGGTTTTGTTTCCTGGAGGGACCCCAA | |
| | GAGTGGCTCCTGGTACGTTGAGACCCTGGA | |
| | CGACATCTTTGAGCAGTGGGCTCACTCTGAA | |
| | GACCTGCAGTCCCTCCTGCTTAGGGTCGCTA | |
| | ATGCTGTTTCGGTGAAAGGGATTTATAAACA | |
| | GATGCCTGGTTGCTTTAATcTCCTCCGGAAA | |
| | AAACTTTTCTTTAAAACATCAGCTAGCAGAG | |
| | CC-(T2A) | |
| Fv-iCASP9 F406T-T2A | SEQ ID NO: 110 | SEQ ID NO: 111 |
| | (Fv-L)- | (Fv-L)- |
| | GTCGACGGATTTGGTGATGTCGGTGCTCTTG | VDGFGDVGALESLRGNADLAYILSME |
| | AGAGTTTGAGGGGAAATGCAGATTTGGCTT | PCGHCLIINNVNFCRESGLRTRTGSNI |
| | ACATCCTGAGCATGGAGCCCTGTGGCCACTG | DCEKLRRRFSSLHFMVEVKGDLTAKK |
| | CCTCATTATCAACAATGTGAACTTCTGCCGT | MVLALLELARQDHGALDCCVVVILSH |
| | GAGTCCGGGCTCCGCACCCGCACTGGCTCCA | GCQASHLQFPGAVYGTDGCPVSVEKI |
| | ACATCGACTGTGAGAAGTTGCGGCGTCGCTT | VNIFNGTSCPSLGGKPKLFFIQACGGE |
| | CTCCTCGCTGCATTTCATGGTGGAGGTGAAG | QKDHGFEVASTSPEDESPGSNPEPDA |
| | GGCGACCTGACTGCCAAGAAAATGGTGCTG | TPFQEGLRTFDQLDAISSLPTPSDIFVS |
| | GCTTTGCTGGAGCTGGCGCGGCAGGACCAC | YSTFPGFVSWRDPKSGSWYVETLDDI |
| | GGTGCTCTGGACTGCTGCGTGGTGGTCATTC | FEQWAHSEDLQSLLLRVANAVSVKGI |
| | TCTCTCACGGCTGTCAGGCCAGCCACCTGCA | YKQMPGCFNtLRKKLFFKTSASRA- |
| | GTTCCCAGGGGCTGTCTACGGCACAGATGG | (T2A) |
| | ATGCCCTGTGTCGGTCGAGAAGATTGTGAA | |
| | CATCTTCAATGGGACCAGCTGCCCCAGCCTG | |
| | GGAGGGAAGCCCAAGCTCTTTTTCATCCAGG | |
| | CCTGTGGTGGGGAGCAGAAAGACCATGGGT | |
| | TTGAGGTGGCCTCCACTTCCCCTGAAGACGA | |
| | GTCCCCTGGCAGTAACCCCGAGCCAGATGCC | |
| | ACCCCGTTCCAGGAAGGTTTGAGGACCTTCG | |
| | ACCAGCTGGACGCCATATCTAGTTTGCCCAC | |
| | ACCCAGTGACATCTTTGTGTCCTACTCTACTT | |
| | TCCCAGGTTTTGTTTCCTGGAGGGACCCCAA | |
| | GAGTGGCTCCTGGTACGTTGAGACCCTGGA | |
| | CGACATCTTTGAGCAGTGGGCTCACTCTGAA | |
| | GACCTGCAGTCCCTCCTGCTTAGGGTCGCTA | |
| | ATGCTGTTTCGGTGAAAGGGATTTATAAACA | |
| | GATGCCTGGTTGCTTTAAttcCCTCCGGAAAA | |
| | AACTTTTCTTTAAAACATCAGCTAGCAGAGC | |
| | C-(T2A) | |
| Fv-L-iCaspase9 S144A | SEQ ID NO: 112 | SEQ ID NO: 113 |
| N405Q-T2A codon | (Fv-L)- | (Fv-L)- |
| optimized | GTGGACGGGTTTGGAGATGTGGGAGCCCTG | VDGFGDVGALEaLRGNADLAYILSME |
| | GAAgCCCTGCGGGGCAATGCCGATCTGGCTT | PCGHCLIINNVNFCRESGLRTRTGSNI |
| | ACATCCTGTCTATGGAGCCTTGCGGCCACTG | DCEKLRRRFSS |
| | TCTGATCATTAACAATGTGAACTTCTGCAGA | LHFMVEVKGDLTAKKMVLALLELAR |
| | GAGAGCGGGCTGCGGACCAGAACAGGATC | QDHGALDCCVVVILSHGCQASHLQF |
| | CAATATTGACTGTGAAAAGCTGCGGAGAAG | PGAVYGTDGC |
| | GTTCTCTAGTCTGCACTTTATGGTCGAGGTG | PVSVEKIVNIFNGTSCPSLGGKPKLFFI |
| | AAAGGCGATCTGACCGCTAAGAAAATGGTG | QACGGEQKDHGFEVASTSPEDESPG |
| | CTGGCCCTGCTGGAACTGGCTCGGCAGGAC | SNPEPDA |
| | CATGGGGCACTGGATTGCTGCGTGGTCGTG | TPFQEGLRTFDQLDAISSLPTPSDIFVS |
| | ATCCTGAGTCACGGCTGCCAGGCTTCACATC | YSTFPGFVSWRDPKSGSWYVETLDDI |
| | TGCAGTTCCCTGGGGCAGTCTATGGAACTGA | FEQWAH |
| | CGGCTGTCCAGTCAGCGTGGAGAAGATCGT | SEDLQSLLLRVANAVSVKGIYKQMPG |
| | GAACATCTTCAACGGCACCTCTTGCCCAAGT | CFqFLRKKLFFKTSASRA-(T2A) |
| | CTGGGCGGGAAGCCCAAACTGTTCTTTATTC | |
| | AGGCCTGTGGAGGCGAGCAGAAAGATCAC | |
| | GGCTTCGAAGTGGCTAGCACCTCCCCCGAG | |
| | GACGAATCACCTGGAAGCAACCCTGAGCCA | |
| | GATGCAACCCCCTTCCAGGAAGGCCTGAGG | |
| | ACATTTGACCAGCTGGATGCCATCTCAAGCC | |
| | TGCCCACACCTTCTGACATTTTCGTCTCTTAC | |
| | AGTACTTTCCCTGGATTTGTGAGCTGGCGCG | |
| | ATCCAAAGTCAGGCAGCTGGTACGTGGAGA | |
| | CACTGGACGATATCTTTGAGCAGTGGGCCCA | |
| | TTCTGAAGACCTGCAGAGTCTGCTGCTGCGA | |
| | GTGGCCAATGCTGTCTCTGTGAAGGGGATCT | |
| | ACAAACAGATGCCAGGATGCTTCcagTTTCT | |
| | GAGAAAGAAACTGTTCTTTAAGACCTCCGCA | |
| | TCTAGGGCC-(T2A) | |
| Fv-iCASP9 S144A | SEQ ID NO: 114 | SEQ ID NO: 115 |
| D330A-T2A | (Fv-L)- | (Fv-L)- |
| | GTCGACGGATTTGGTGATGTCGGTGCTCTTG | VDGFGDVGALEaLRGNADLAYILSME |
| | AGgcTTTGAGGGGAAATGCAGATTTGGCTTA | PCGHCLIINNVNFCRESGLRTRTGSNI |
| | CATCCTGAGCATGGAGCCCTGTGGCCACTGC | DCEKLRRRFSSLHFMVEVKGDLTAKK |
| | CTCATTATCAACAATGTGAACTTCTGCCGTG | MVLALLELARQDHGALDCCVVVILSH |
| | AGTCCGGGCTCCGCACCCGCACTGGCTCCAA | GCQASHLQFPGAVYGTDGCPVSVEKI |
| | CATCGACTGTGAGAAGTTGCGGCGTCGCTTC | VNIFNGTSCPSLGGKPKLFFIQACGGE |
| | TCCTCGCTGCATTTCATGGTGGAGGTGAAGG | QKDHGFEVASTSPEDESPGSNPEPDA |
| | GCGACCTGACTGCCAAGAAAATGGTGCTGG | TPFQEGLRTFDQLaAISSLPTPSDIFVS |
| | CTTTGCTGGAGCTGGCGCGGCAGGACCACG | YSTFPGFVSWRDPKSGSWYVETLDDI |
| | GTGCTCTGGACTGCTGCGTGGTGGTCATTCT | FEQWAHSEDLQSLLLRVANAVSVKGI |
| | CTCTCACGGCTGTCAGGCCAGCCACCTGCAG | YKQMPGCFNFLRKKLFFKTSASRA |
| | TTCCCAGGGGCTGTCTACGGCACAGATGGA | |
| | TGCCCTGTGTCGGTCGAGAAGATTGTGAAC | |
| | ATCTTCAATGGGACCAGCTGCCCCAGCCTGG | |
| | GAGGGAAGCCCAAGCTCTTTTTCATCCAGGC | |
| | CTGTGGTGGGGAGCAGAAAGACCATGGGTT | |
| | TGAGGTGGCCTCCACTTCCCCTGAAGACGAG | |
| | TCCCCTGGCAGTAACCCCGAGCCAGATGCCA | |
| | CCCCGTTCCAGGAAGGTTTGAGGACCTTCGA | |
| | CCAGCTGGcCGCCATATCTAGTTTGCCCACA | |
| | CCCAGTGACATCTTTGTGTCCTACTCTACTTT | |
| | CCCAGGTTTTGTTTCCTGGAGGGACCCCAAG | |
| | AGTGGCTCCTGGTACGTTGAGACCCTGGAC | |
| | GACATCTTTGAGCAGTGGGCTCACTCTGAAG | |
| | ACCTGCAGTCCCTCCTGCTTAGGGTCGCTAA | |
| | TGCTGTTTCGGTGAAAGGGATTTATAAACAG | |
| | ATGCCTGGTTGCTTTAATTTCCTCCGGAAAA | |
| | AACTTTTCTTTAAAACATCAGCTAGCAGAGC | |
| | C-(T2A) | |
| Fv-iCASP9 S144D | SEQ ID NO: 116 | SEQ ID NO: 117 |
| D330A-T2A | (Fv-L)- | (Fv-L)- |
| | GTCGACGGATTTGGTGATGTCGGTGCTCTTG | VDGFGDVGALEdLRGNADLAYILSME |
| | AGgacTTGAGGGGAAATGCAGATTTGGCTTA | PCGHCLIINNVNFCRESGLRTRTGSNI |
| | CATCCTGAGCATGGAGCCCTGTGGCCACTGC | DCEKLRRRFSSLHFMVEVKGDLTAKK |
| | CTCATTATCAACAATGTGAACTTCTGCCGTG | MVLALLELARQDHGALDCCVVVILSH |
| | AGTCCGGGCTCCGCACCCGCACTGGCTCCAA | GCQASHLQFPGAVYGTDGCPVSVEKI |
| | CATCGACTGTGAGAAGTTGCGGCGTCGCTTC | VNIFNGTSCPSLGGKPKLFFIQACGGE |
| | TCCTCGCTGCATTTCATGGTGGAGGTGAAGG | QKDHGFEVASTSPEDESPGSNPEPDA |
| | GCGACCTGACTGCCAAGAAAATGGTGCTGG | TPFQEGLRTFDQLaAISSLPTPSDIFVS |
| | CTTTGCTGGAGCTGGCGCGGCAGGACCACG | YSTFPGFVSWRDPKSGSWYVETLDDI |
| | GTGCTCTGGACTGCTGCGTGGTGGTCATTCT | FEQWAHSEDLQSLLLRVANAVSVKGI |
| | CTCTCACGGCTGTCAGGCCAGCCACCTGCAG | YKQMPGCFNFLRKKLFFKTSASRA |
| | TTCCCAGGGGCTGTCTACGGCACAGATGGA | |
| | TGCCCTGTGTCGGTCGAGAAGATTGTGAAC | |
| | ATCTTCAATGGGACCAGCTGCCCCAGCCTGG | |
| | GAGGGAAGCCCAAGCTCTTTTTCATCCAGGC | |
| | CTGTGGTGGGGAGCAGAAAGACCATGGGTT | |
| | TGAGGTGGCCTCCACTTCCCCTGAAGACGAG | |
| | TCCCCTGGCAGTAACCCCGAGCCAGATGCCA | |
| | CCCCGTTCCAGGAAGGTTTGAGGACCTTCGA | |
| | CCAGCTGGcCGCCATATCTAGTTTGCCCACA | |
| | CCCAGTGACATCTTTGTGTCCTACTCTACTTT | |
| | CCCAGGTTTTGTTTCCTGGAGGGACCCCAAG | |
| | AGTGGCTCCTGGTACGTTGAGACCCTGGAC | |
| | GACATCTTTGAGCAGTGGGCTCACTCTGAAG | |
| | ACCTGCAGTCCCTCCTGCTTAGGGTCGCTAA | |
| | TGCTGTTTCGGTGAAAGGGATTTATAAACAG | |
| | ATGCCTGGTTGCTTTAATTTCCTCCGGAAAA | |
| | AACTTTTCTTTAAAACATCAGCTAGCAGAGC | |
| | C-(T2A) | |
| Fv-iCASP9 S196A | SEQ ID NO: 118 | SEQ ID NO: 119 |
| D330A-T2A | (Fv-L)- | (Fv-L)- |
| | GTCGACGGATTTGGTGATGTCGGTGCTCTTG | VDGFGDVGALESLRGNADLAYILSME |
| | AGAGTTTGAGGGGAAATGCAGATTTGGCTT | PCGHCLIINNVNFCRESGLRTRTGSNI |
| | ACATCCTGAGCATGGAGCCCTGTGGCCACTG | DCEKLRRRFSaLHFMVEVKGDLTAKK |
| | CCTCATTATCAACAATGTGAACTTCTGCCGT | MVLALLELARQDHGALDCCVVVILSH |
| | GAGTCCGGGCTCCGCACCCGCACTGGCTCCA | GCQASHLQFPGAVYGTDGCPVSVEKI |
| | ACATCGACTGTGAGAAGTTGCGGCGTCGCTT | VNIFNGTSCPSLGGKPKLFFIQACGGE |
| | CTCCgCGCTGCATTTCATGGTGGAGGTGAAG | QKDHGFEVASTSPEDESPGSNPEPDA |
| | GGCGACCTGACTGCCAAGAAAATGGTGCTG | TPFQEGLRTFDQLaAISSLPTPSDIFVS |
| | GCTTTGCTGGAGCTGGCGCGGCAGGACCAC | YSTFPGFVSWRDPKSGSWYVETLDDI |
| | GGTGCTCTGGACTGCTGCGTGGTGGTCATTC | FEQWAHSEDLQSLLLRVANAVSVKGI |
| | TCTCTCACGGCTGTCAGGCCAGCCACCTGCA | YKQMPGCFNFLRKKLFFKTSASRA- |
| | GTTCCCAGGGGCTGTCTACGGCACAGATGG | (T2A) |
| | ATGCCCTGTGTCGGTCGAGAAGATTGTGAA | |
| | CATCTTCAATGGGACCAGCTGCCCCAGCCTG | |
| | GGAGGGAAGCCCAAGCTCTTTTTCATCCAGG | |
| | CCTGTGGTGGGGAGCAGAAAGACCATGGGT | |
| | TTGAGGTGGCCTCCACTTCCCCTGAAGACGA | |
| | GTCCCCTGGCAGTAACCCCGAGCCAGATGCC | |
| | ACCCCGTTCCAGGAAGGTTTGAGGACCTTCG | |
| | ACCAGCTGGcCGCCATATCTAGTTTGCCCAC | |
| | ACCCAGTGACATCTTTGTGTCCTACTCTACTT | |
| | TCCCAGGTTTTGTTTCCTGGAGGGACCCCAA | |
| | GAGTGGCTCCTGGTACGTTGAGACCCTGGA | |
| | CGACATCTTTGAGCAGTGGGCTCACTCTGAA | |
| | GACCTGCAGTCCCTCCTGCTTAGGGTCGCTA | |
| | ATGCTGTTTCGGTGAAAGGGATTTATAAACA | |
| | GATGCCTGGTTGCTTTAATTTCCTCCGGAAA | |
| | AAACTTTTCTTTAAAACATCAGCTAGCAGAG | |
| | CC-(T2A) | |
| Fv-iCASP9 S196D | SEQ ID NO: 120 | SEQ ID NO: 121 |
| D330A-T2A | (Fv-L)- | (Fv-L)- |
| | GTCGACGGATTTGGTGATGTCGGTGCTCTTG | VDGFGDVGALESLRGNADLAYILSME |
| | AGAGTTTGAGGGGAAATGCAGATTTGGCTT | PCGHCLIINNVNFCRESGLRTRTGSNI |
| | ACATCCTGAGCATGGAGCCCTGTGGCCACTG | DCEKLRRRFSdLHFMVEVKGDLTAKK |
| | CCTCATTATCAACAATGTGAACTTCTGCCGT | MVLALLELARQDHGALDCCVVVILS |
| | GAGTCCGGGCTCCGCACCCGCACTGGCTCCA | GCQASHLQFPGAVYGTDGCPVSVEKI |
| | ACATCGACTGTGAGAAGTTGCGGCGTCGCTT | VNIFNGTSCPSLGGKPKLFFIQACGGE |
| | CTCCgacCTGCATTTCATGGTGGAGGTGAAG | QKDHGFEVASTSPEDESPGSNPEPDA |
| | GGCGACCTGACTGCCAAGAAAATGGTGCTG | TPFQEGLRTFDQLaAISSLPTPSDI |
| | GCTTTGCTGGAGCTGGCGCGGCAGGACCAC | YSTFPGFVSWRDPKSGSWYVETLDD |
| | GGTGCTCTGGACTGCTGCGTGGTGGTCATTC | FEQWAHSEDLQSLLLRVANAVSVKGI |
| | TCTCTCACGGCTGTCAGGCCAGCCACCTGCA | YKQMPGCFNFLRKKLFFKTSASRA- |
| | GTTCCCAGGGGCTGTCTACGGCACAGATGG | (T2A) |
| | ATGCCCTGTGTCGGTCGAGAAGATTGTGAA | |
| | CATCTTCAATGGGACCAGCTGCCCCAGCCTG | |
| | GGAGGGAAGCCCAAGCTCTTTTTCATCCAGG | |
| | CCTGTGGTGGGGAGCAGAAAGACCATGGGT | |
| | TTGAGGTGGCCTCCACTTCCCCTGAAGACGA | |
| | GTCCCCTGGCAGTAACCCCGAGCCAGATGCC | |
| | ACCCCGTTCCAGGAAGGTTTGAGGACCTTCG | |
| | ACCAGCTGGcCGCCATATCTAGTTTGCCCAC | |
| | ACCCAGTGACATCTTTGTGTCCTACTCTACTT | |
| | TCCCAGGTTTTGTTTCCTGGAGGGACCCCAA | |
| | GAGTGGCTCCTGGTACGTTGAGACCCTGGA | |
| | CGACATCTTTGAGCAGTGGGCTCACTCTGAA | |
| | GACCTGCAGTCCCTCCTGCTTAGGGTCGCTA | |
| | ATGCTGTTTCGGTGAAAGGGATTTATAAACA | |
| | GATGCCTGGTTGCTTTAATTTCCTCCGGAAA | |
| | AAACTTTTCTTTAAAACATCAGCTAGCAGAG | |
| | CC-(T2A) | |
| Fv-L-iCaspase9 T317S | SEQ ID NO: 122 | SEQ ID NO: 123 |
| N405Q-T2A codon | (Fv-L)- | (Fv-L)- |
| optimized | GTGGACGGGTTTGGAGATGTGGGAGCCCTG | VDGFGDVGALESLRGNADLAYILSME |
| | GAATCCCTGCGGGGCAATGCCGATCTGGCTT | PCGHCLIINNVNFCRESGLRTRTGSNI |
| | ACATCCTGTCTATGGAGCCTTGCGGCCACTG | DCEKLRRRFSS |
| | TCTGATCATTAACAATGTGAACTTCTGCAGA | LHFMVEVKGDLTAKKMVLALLELAR |
| | GAGAGCGGGCTGCGGACCAGAACAGGATC | QDHGALDCCVVVILSHGCQASHLQF |
| | CAATATTGACTGTGAAAAGCTGCGGAGAAG | PGAVYGTDGC |
| | GTTCTCTAGTCTGCACTTTATGGTCGAGGTG | PVSVEKIVNIFNGTSCPSLGGKPKLFFI |
| | AAAGGCGATCTGACCGCTAAGAAAATGGTG | QACGGEQKDHGFEVASTSPEDESPG |
| | CTGGCCCTGCTGGAACTGGCTCGGCAGGAC | SNPEPDA |
| | CATGGGGCACTGGATTGCTGCGTGGTCGTG | sPFQEGLRTFDQLDAISSLPTPSDIFVS |
| | ATCCTGAGTCACGGCTGCCAGGCTTCACATC | YSTFPGFVSWRDPKSGSWYVETLDDI |
| | TGCAGTTCCCTGGGGCAGTCTATGGAACTGA | FEQWAH |
| | CGGCTGTCCAGTCAGCGTGGAGAAGATCGT | SEDLQSLLLRVANAVSVKGIYKQMPG |
| | GAACATCTTCAACGGCACCTCTTGCCCAAGT | CFqFLRKKLFFKTSASRA-(T2A) |
| | CTGGGCGGGAAGCCCAAACTGTTCTTTATTC | |
| | AGGCCTGTGGAGGCGAGCAGAAAGATCAC | |
| | GGCTTCGAAGTGGCTAGCACCTCCCCCGAG | |
| | GACGAATCACCTGGAAGCAACCCTGAGCCA | |
| | GATGCAAgCCCCTTCCAGGAAGGCCTGAGG | |
| | ACATTTGACCAGCTGGATGCCATCTCAAGCC | |
| | TGCCCACACCTTCTGACATTTTCGTCTCTTAC | |
| | AGTACTTTCCCTGGATTTGTGAGCTGGCGCG | |
| | ATCCAAAGTCAGGCAGCTGGTACGTGGAGA | |
| | CACTGGACGATATCTTTGAGCAGTGGGCCCA | |
| | TTCTGAAGACCTGCAGAGTCTGCTGCTGCGA | |
| | GTGGCCAATGCTGTCTCTGTGAAGGGGATCT | |
| | ACAAACAGATGCCAGGATGCTTCcagTTTCT | |
| | GAGAAAGAAACTGTTCTTTAAGACCTCCGCA | |
| | TCTAGGGCC-(T2A) | |
| Fv-L-Caspase9 D330A | SEQ ID NO: 124 | SEQ ID NO: 125 |
| N405Q-T2A | (Fv-L)- | (Fv-L)- |
| | GTCGACGGATTTGGTGATGTCGGTGCTCTTG | VDGFGDVGALESLRGNADLAYILSME |
| | AGAGTTTGAGGGGAAATGCAGATTTGGCTT | PCGHCLIINNVNFCRESGLRTRTGSNI |
| | ACATCCTGAGCATGGAGCCCTGTGGCCACTG | DCEKLRRRFSS |
| | CCTCATTATCAACAATGTGAACTTCTGCCGT | LHFMVEVKGDLTAKKMVLALLELAR |
| | GAGTCCGGGCTCCGCACCCGCACTGGCTCCA | QDHGALDCCVVVILSHGCQASHLQF |
| | ACATCGACTGTGAGAAGTTGCGGCGTCGCTT | PGAVYGTDGC |
| | CTCCTCGCTGCATTTCATGGTGGAGGTGAAG | PVSVEKIVNIFNGTSCPSLGGKPKLFFI |
| | GGCGACCTGACTGCCAAGAAAATGGTGCTG | QACGGEQKDHGFEVASTSPEDESPG |
| | GCTTTGCTGGAGCTGGCGCGGCAGGACCAC | SNPEPDA |
| | GGTGCTCTGGACTGCTGCGTGGTGGTCATTC | TPFQEGLRTFDQLaAISSLPTPSDIFVS |
| | TCTCTCACGGCTGTCAGGCCAGCCACCTGCA | YSTFPGFVSWRDPKSGSWYVETLDDI |
| | GTTCCCAGGGGCTGTCTACGGCACAGATGG | FEQWAH |
| | ATGCCCTGTGTCGGTCGAGAAGATTGTGAA | SEDLQSLLLRVANAVSVKGIYKQMPG |
| | CATCTTCAATGGGACCAGCTGCCCCAGCCTG | CFqFLRKKLFFKTSASRA-(T2A) |
| | GGAGGGAAGCCCAAGCTCTTTTTCATCCAGG | |
| | CCTGTGGTGGGGAGCAGAAAGACCATGGGT | |
| | TTGAGGTGGCCTCCACTTCCCCTGAAGACGA | |
| | GTCCCCTGGCAGTAACCCCGAGCCAGATGCC | |
| | ACCCCGTTCCAGGAAGGTTTGAGGACCTTCG | |
| | ACCAGCTGGcCGCCATATCTAGTTTGCCCAC | |
| | ACCCAGTGACATCTTTGTGTCCTACTCTACTT | |
| | TCCCAGGTTTTGTTTCCTGGAGGGACCCCAA | |
| | GAGTGGCTCCTGGTACGTTGAGACCCTGGA | |
| | CGACATCTTTGAGCAGTGGGCTCACTCTGAA | |
| | GACCTGCAGTCCCTCCTGCTTAGGGTCGCTA | |
| | ATGCTGTTTCGGTGAAAGGGATTTATAAACA | |
| | GATGCCTGGTTGCTTcagTTTCCTCCGGAAAA | |
| | AACTTTTCTTTAAAACATCAGCTAGCAGAGC | |
| | C-(T2A) | |
| Fv-iCASP9 | SEQ ID NO: 126 | SEQ ID NO: 127 |
| ATPF316AVPI-T2A | (Fv-L)- | (Fv-L)- |
| | GTCGACGGATTTGGTGATGTCGGTGCTCTTG | VDGFGDVGALESLRGNADLAYILSME |
| | AGAGTTTGAGGGGAAATGCAGATTTGGCTT | PCGHCLIINNVNFCRESGLRTRTGSNI |
| | ACATCCTGAGCATGGAGCCCTGTGGCCACTG | DCEKLRRRFSSLHFMVEVKGDLTAKK |
| | CCTCATTATCAACAATGTGAACTTCTGCCGT | MVLALLELARQDHGALDCCVVVILSH |
| | GAGTCCGGGCTCCGCACCCGCACTGGCTCCA | GCQASHLQFPGAVYGTDGCPVSVEKI |
| | ACATCGACTGTGAGAAGTTGCGGCGTCGCTT | VNIFNGTSCPSLGGKPKLFFIQACGGE |
| | CTCCTCGCTGCATTTCATGGTGGAGGTGAAG | QKDHGFEVASTSPEDESPGSNPEPDA |
| | GGCGACCTGACTGCCAAGAAAATGGTGCTG | vPiQEGLRTFDQLDAISSLPTPSDIFVS |
| | GCTTTGCTGGAGCTGGCGCGGCAGGACCAC | YSTFPGFVSWRDPKSGSWYVETLDDI |
| | GGTGCTCTGGACTGCTGCGTGGTGGTCATTC | FEQWAHSEDLQSLLLRVANAVSVKGI |
| | TCTCTCACGGCTGTCAGGCCAGCCACCTGCA | YKQMPGCFNFLRKKLFFKTSASRA- |
| | GTTCCCAGGGGCTGTCTACGGCACAGATGG | (T2A) |
| | ATGCCCTGTGTCGGTCGAGAAGATTGTGAA | |
| | CATCTTCAATGGGACCAGCTGCCCCAGCCTG | |
| | GGAGGGAAGCCCAAGCTCTTTTTCATCCAGG | |
| | CCTGTGGTGGGGAGCAGAAAGACCATGGGT | |
| | TTGAGGTGGCCTCCACTTCCCCTGAAGACGA | |
| | GTCCCCTGGCAGTAACCCCGAGCCAGATGCC | |
| | gtgCCcaTCCAGGAAGGTTTGAGGACCTTCGA | |
| | CCAGCTGGACGCCATATCTAGTTTGCCCACA | |
| | CCCAGTGACATCTTTGTGTCCTACTCTACTTT | |
| | CCCAGGTTTTGTTTCCTGGAGGGACCCCAAG | |
| | AGTGGCTCCTGGTACGTTGAGACCCTGGAC | |
| | GACATCTTTGAGCAGTGGGCTCACTCTGAAG | |
| | ACCTGCAGTCCCTCCTGCTTAGGGTCGCTAA | |
| | TGCTGTTTCGGTGAAAGGGATTTATAAACAG | |
| | ATGCCTGGTTGCTTTAATTTCCTCCGGAAAA | |
| | AACTTTTCTTTAAAACATCAGCTAGCAGAGC | |
| | C-(T2A) | |
| Fv-iCASP9 isaqt-T2A | SEQ ID NO: 128 | SEQ ID NO: 129 |
| | (Fv-L)- | (Fv-L)- |
| | GTCGACGGATTTGGTGATGTCGGTGCTCTTG | VDGFGDVGALESLRGNADLAYILSME |
| | AGAGTTTGAGGGGAAATGCAGATTTGGCTT | PCGHCLIINNVNFCRESGLRTRTGSNI |
| | ACATCCTGAGCATGGAGCCCTGTGGCCACTG | DCEKLRRRFSS |
| | CCTCATTATCAACAATGTGAACTTCTGCCGT | LHFMVEVKGDLTAKKMVLALLELAR |
| | GAGTCCGGGCTCCGCACCCGCACTGGCTCCA | QDHGALDCCVVVILSHGCQASHLQF |
| | ACATCGACTGTGAGAAGTTGCGGCGTCGCTT | PGAVYGTDGC |
| | CTCCTCGCTGCATTTCATGGTGGAGGTGAAG | PVSVEKIVNIFNGTSCPSLGGKPKLFFI |
| | GGCGACCTGACTGCCAAGAAAATGGTGCTG | QACGGEQKDHGFEVASTSPEDESPG |
| | GCTTTGCTGGAGCTGGCGCGGCAGGACCAC | SNPEPDA |
| | GGTGCTCTGGACTGCTGCGTGGTGGTCATTC | TPFQEGLRTFDQLDAISSLPTPSDIFVS |
| | TCTCTCACGGCTGTCAGGCCAGCCACCTGCA | YSTFPGFVSWRDPKSGSWYVETLDDI |
| | GTTCCCAGGGGCTGTCTACGGCACAGATGG | FEQWAH |
| | ATGCCCTGTGTCGGTCGAGAAGATTGTGAA | SEDLQSLLLRVANAVSVKGIYKQMPis |
| | CATCTTCAATGGGACCAGCTGCCCCAGCCTG | aqtLRKKLFFKTSASRA-(T2A) |
| | GGAGGGAAGCCCAAGCTCTTTTTCATCCAGG | |
| | CCTGTGGTGGGGAGCAGAAAGACCATGGGT | |
| | TTGAGGTGGCCTCCACTTCCCCTGAAGACGA | |
| | GTCCCCTGGCAGTAACCCCGAGCCAGATGCC | |
| | ACCCCGTTCCAGGAAGGTTTGAGGACCTTCG | |
| | ACCAGCTGGACGCCATATCTAGTTTGCCCAC | |
| | ACCCAGTGACATCTTTGTGTCCTACTCTACTT | |
| | TCCCAGGTTTTGTTTCCTGGAGGGACCCCAA | |
| | GAGTGGCTCCTGGTACGTTGAGACCCTGGA | |
| | CGACATCTTTGAGCAGTGGGCTCACTCTGAA | |
| | GACCTGCAGTCCCTCCTGCTTAGGGTCGCTA | |
| | ATGCTGTTTCGGTGAAAGGGATTTATAAACA | |
| | GATGCCgatatccgcacagacaCTCCGGAAAAAA | |
| | CTTTTCTTTAAAACATCAGCTAGCAGAGCC- | |
| | (T2A) | |

[0616] Partial sequence of a plasmid insert coding for a polypeptide that encodes an inducible Caspase-9 polypeptide and a chimeric antigen receptor that binds to CD19, separated by a 2A linker, wherein the two Caspase-9 polypeptide and the chimeric antigen receptor are separated during translation. The example of a chimeric antigen receptor provided herein may be further modified by including costimulatory polypeptides such as, for example, but not limited to, CD28, 4-1BB and OX40. The inducible Caspase-9 polypeptide provided herein may be substituted by an inducible modified Caspase-9 polypeptide, such as, for example, those provided herein.

FKBPv36
SEQ ID NO: 130
ATGCTGGAGGGAGTGCAGGTGGAGACTATTAGCCCCGGAGATGGCAGAA
CATTCCCCAAAAGAGGACAGACTTGCGTCGTGCATTATACTGGAATGCT
GGAAGACGGCAAGAAGGTGGACAGCAGCCGGGACCGAAACAAGCCCTTC
AAGTTCATGCTGGGGAAGCAGGAAGTGATCCGGGGCTGGGAGGAAGGAG
TCGCACAGATGTCAGTGGGACAGAGGGCCAAACTGACTATTAGCCCAGA
CTACGCTTATGGAGCAACCGGCCACCCCGGGATCATTCCCCCTCATGCT
ACACTGGTCTTCGATGTGGAGCTGCTGAAGCTGGAA
FKBPv36
SEQ ID NO: 131
MLEGVQVETISPGDGRTFPKRGQTCVVHYTGMLEDGKKVDSSRDRNKPF
KFMLGKQEVIRGWEEGVAQMSVGQRAKLTISPDYAYGATGHPGIIPPHA
TLVFDVELLKLE
Linker
SEQ ID NO: 132
AGCGGAGGAGGATCCGGA
Linker
SEQ ID NO: 133
SGGGSG
Caspase-9
SEQ ID NO: 134
GTGGACGGGTTTGGAGATGTGGGAGCCCTGGAATCCCTGCGGGGCAATG
CCGATCTGGCTTACATCCTGTCTATGGAGCCTTGCGGCCACTGTCTGAT
CATTAACAATGTGAACTTCTGCAGAGAGAGCGGGCTGCGGACCAGAACA
GGATCCAATATTGACTGTGAAAAGCTGCGGAGAAGGTTCTCTAGTCTGC
ACTTTATGGTCGAGGTGAAAGGCGATCTGACCGCTAAGAAAATGGTGCT
GGCCCTGCTGGAACTGGCTCGGCAGGACCATGGGGCACTGGATTGCTGC
GTGGTCGTGATCCTGAGTCACGGCTGCCAGGCTTCACATCTGCAGTTCC
CTGGGGCAGTCTATGGAACTGACGGCTGTCCAGTCAGCGTGGAGAAGAT
CGTGAACATCTTCAACGGCACCTCTTGCCCAAGTCTGGGCGGGAAGCCC
AAACTGTTCTTTATTCAGGCCTGTGGAGGCGAGCAGAAAGATCACGGCT
TCGAAGTGGCTAGCACCTCCCCCGAGGACGAATCACCTGGAAGCAACCC
TGAGCCAGATGCAACCCCCTTCCAGGAAGGCCTGAGGACATTTGACCAG
CTGGATGCCATCTCAAGCCTGCCCACACCTTCTGACATTTTCGTCTCTT
ACAGTACTTTCCCTGGATTTGTGAGCTGGCGCGATCCAAAGTCAGGCAG
CTGGTACGTGGAGACACTGGACGATATCTTTGAGCAGTGGGCCCATTCT
GAAGACCTGCAGAGTCTGCTGCTGCGAGTGGCCAATGCTGTCTCTGTGA
AGGGGATCTACAAACAGATGCCAGGATGCTTCAACTTTCTGAGAAAGAA
ACTGTTCTTTAAGACCTCCGCATCTAGGGCC
Caspase-9
SEQ ID NO: 135
VDGFGDVGALESLRGNADLAYILSMEPCGHCLIINNVNFCRESGLRTRT
GSNIDCEKLRRRFSSLHFMVEVKGDLTAKKMVLALLELARQDHGALDCC
VVVILSHGCQASHLQFPGAVYGTDGCPVSVEKIVNIFNGTSCPSLGGKP
KLFFIQACGGEQKDHGFEVASTSPEDESPGSNPEPDATPFQEGLRTFDQ
LDAISSLPTPSDIFVSYSTFPGFVSWRDPKSGSWYVETLDDIFEQWAHS
EDLQSLLLRVANAVSVKGIYKQMPGCFNFLRKKLFFKTSASRA
Linker
SEQ ID NO: 136
CCGCGG
Linker
SEQ ID NO: 137
PR
T2A
SEQ ID NO: 138
GAAGGCCGAGGGAGCCTGCTGACATGTGGCGATGTGGAGGAAAACCCAG
GACCA
T2A
SEQ ID NO: 139
EGRGSLLTCGDVEENPGP
Linker
SEQ ID NO: 140
CCATGG
Linker
SEQ ID NO: 141
PW
Signal peptide
SEQ ID NO: 142
ATGGAGTTTGGACTTTCTTGGTTGTTTTTGGTGGCAATTCTGAAGGGTG
TCCAGTGTAGCAGG
Signal peptide
SEQ ID NO: 143
MEFGLSWLFLVAILKGVQCSR
FMC63 variable light chain (anti-CD19)
SEQ ID NO: 144
GACATCCAGATGACACAGACTACATCCTCCCTGTCTGCCTCTCTGGGAG
ACAGAGTCACCATCAGTTGCAGGGCAAGTCAGGACATTAGTAAATATTT
AAATTGGTATCAGCAGAAACCAGATGGAACTGTTAAACTCCTGATCTAC
CATACATCAAGATTACACTCAGGAGTCCCATCAAGGTTCAGTGGCAGTG
GGTCTGGAACAGATTATTCTCTCACCATTAGCAACCTGGAGCAAGAAGA
TATTGCCACTTACTTTTGCCAACAGGGTAATACGCTTCCGTACACGTTC
GGAGGGGGGACTAAGTTGGAAATAACA
FMC63 variable light chain (anti CD19)
SEQ ID NO: 145
DIQMTQTTSSLSASLGDRVTISCRASQDISKYLNWYQQKPDGTVKLLIY
HTSRLHSGVPSRFSGSGSGTDYSLTISNLEQEDIATYFCQQGNTLPYTF
GGGTKLEIT
Flexible linker
SEQ ID NO: 146
GGCGGAGGAAGCGGAGGTGGGGGC
Flexible linker
SEQ ID NO: 147
GGGSGGGG
FMC63 variable heavy chain (anti-CD19)
SEQ ID NO: 148
GAGGTGAAACTGCAGGAGTCAGGACCTGGCCTGGTGGCGCCCTCACAGA
GCCTGTCCGTCACATGCACTGTCTCAGGGGTCTCATTACCCGACTATGG
TGTAAGCTGGATTCGCCAGCCTCCACGAAAGGGTCTGGAGTGGCTGGGA
GTAATATGGGGTAGTGAAACCACATACTATAATTCAGCTCTCAAATCCA
GACTGACCATCATCAAGGACAACTCCAAGAGCCAAGTTTTCTTAAAAAT
GAACAGTCTGCAAACTGATGACACAGCCATTTACTACTGTGCCAAACAT
TATTACTACGGTGGTAGCTATGCTATGGACTACTGGGGTCAAGGAACCT
CAGTCACCGTCTCCTCA
FMC63 variable heavy chain (anti CD19)
SEQ ID NO: 149
EVKLQESGPGLVAPSQSLSVTCTVSGVSLPDYGVSWIRQPPRKGLEWLG
VIWGSETTYYNSALKSRLTIIKDNSKSQVFLKMNSLQTDDTAIYYCAKH
YYYGGSYAMDYWGQGTSVTVSS
Linker
SEQ ID NO: 150
GGATCC
Linker
SEQ ID NO: 151
GS
CD34 minimal epitope
SEQ ID NO: 152
GAACTTCCTACTCAGGGGACTTTCTCAAACGTTAGCACAAACGTAAGT
CD34 minimal epitope
SEQ ID NO: 153
ELPTQGTFSNVSTNVS
CD8 α stalk domain
SEQ ID NO: 154
CCCGCCCCAAGACCCCCCACACCTGCGCCGACCATTGCTTCTCAACCCC
TGAGTTTGAGACCCGAGGCCTGCCGGCCAGCTGCCGGCGGGGCCGTGCA
TACAAGAGGACTCGATTTCGCTTGCGAC
CD8 α stalk domain
SEQ ID NO: 155
PAPRPPTPAPTIASQPLSLRPEACRPAAGGAVHTRGLDFACD
CD8 α transmembrane domain
SEQ ID NO: 156
ATCTATATCTGGGCACCTCTCGCTGGCACCTGTGGAGTCCTTCTGCTCA
GCCTGGTTATTACTCTGTACTGTAATCACCGGAATCGCCGCCGCGTTTG
TAAGTGTCCCAGG
CD8 α transmembrane domain
SEQ ID NO: 157
IYIWAPLAGTCGVLLLSLVITLYCNHRNRRRVCKCPR
Linker
SEQ ID NO: 158
GTCGAC
Linker
SEQ ID NO: 159
VD
CD3 zeta
SEQ ID NO: 160
AGAGTGAAGTTCAGCAGGAGCGCAGACGCCCCCGCGTACCAGCAGGGCC
AGAACCAGCTCTATAACGAGCTCAATCTAGGACGAAGAGAGGAGTACGA
TGTTTTGGACAAGAGACGTGGCCGGGACCCTGAGATGGGGGGAAAGCCG
AGAAGGAAGAACCCTCAGGAAGGCCTGTACAATGAACTGCAGAAAGATA
AGATGGCGGAGGCCTACAGTGAGATTGGGATGAAAGGCGAGCGCCGGAG
GGGCAAGGGGCACGATGGCCTTTACCAGGGTCTCAGTACAGCCACCAAG
GACACCTACGACGCCCTTCACATGCAGGCCCTGCCCCCTCGC
CD3 zeta
SEQ ID NO: 161
RVKFSRSADAPAYQQGQNQLYNELNLGRREEYDVLDKRRGRDPEMGGKP
RRKNPQEGLYNELQKDKMAEAYSEIGMKGERRRGKGHDGLYQGLSTATK
DTYDALHMQALPPR

[0617] Provided below is an example of a plasmid insert coding for a chimeric antigen receptor that binds to Her2/Neu. The chimeric antigen receptor may be further modified by including costimulatory polypeptides such as, for example, but not limited to, CD28, OX40, and 4-1 BB.

Signal peptide
SEQ ID NO: 162
ATGGAGTTTGGACTTTCTTGGTTGTTTTTGGTGGCAATTCTGAAGGGTG
TCCAGTGTAGCAGG
Signal peptide
SEQ ID NO: 163
MEFGLSWLFLVAILKGVQCSR
FRP5 variable light chain (anti-Her2)
SEQ ID NO: 164
GACATCCAATTGACACAATCACACAAATTTCTCTCAACTTCTGTAGGAG
ACAGAGTGAGCATAACCTGCAAAGCATCCCAGGACGTGTACAATGCTGT
GGCTTGGTACCAACAGAAGCCTGGACAATCCCCAAAATTGCTGATTTAT
TCTGCCTCTAGTAGGTACACTGGGGTACCTTCTCGGTTTACGGGCTCTG
GGTCCGGACCAGATTTCACGTTCACAATCAGTTCCGTTCAAGCTGAAGA
CCTCGCTGTTTATTTTTGCCAGCAGCACTTCCGAACCCCTTTTACTTTT
GGCTCAGGCACTAAGTTGGAAATCAAGGCTTTG
FRP5 variable light chain (anti-Her2)
SEQ ID NO: 165
DIQLTQSHKFLSTSVGDRVSITCKASQDVYNAVAWYQQKPGQSPKWYSA
SSRYTGVPSRFTGSGSGPDFTFTISSVQAEDLAVYFCQQHFRTPFTFGS
GTKLEIKAL
Flexible linker
SEQ ID NO: 166
GGCGGAGGAAGCGGAGGTGGGGGC
Flexible linker
SEQ ID NO: 167
GGGSGGGG
FRP5 variable heavy chain (anti-Her2/Neu)
SEQ ID NO: 168
GAAGTCCAATTGCAACAGTCAGGCCCCGAATTGAAAAAGCCCGGCGAAA
CAGTGAAGATATCTTGTAAAGCCTCCGGTTACCCTTTTACGAACTATGG
AATGAACTGGGTCAAACAAGCCCCTGGACAGGGATTGAAGTGGATGGGA
TGGATCAATACATCAACAGGCGAGTCTACCTTCGCAGATGATTTCAAAG
GTCGCTTTGACTTCTCACTGGAGACCAGTGCAAATACCGCCTACCTTCA
GATTAACAATCTTAAAAGCGAGGATATGGCAACCTACTTTTGCGCAAGA
TGGGAAGTTTATCACGGGTACGTGCCATACTGGGGACAAGGAACGACAG
TGACAGTTAGTAGC
FRP5 variable heavy chain (anti-Her2/Neu)
SEQ ID NO: 169
EVQLQQSGPELKKPGETVKISCKASGYPFTNYGMNWVKQAPGQGLKWMG
WINTSTGESTFADDFKGRFDFSLETSANTAYLQINNLKSEDMATYFCAR
WEVYHGYVPYWGQGTTVTVSS
Linker
SEQ ID NO: 170
GGATCC
Linker
SEQ ID NO: 171
GS
CD34 minimal epitope
SEQ ID NO: 172
GAACTTCCTACTCAGGGGACTTTCTCAAACGTTAGCACAAACGTAAGT
CD34 minimal epitope
SEQ ID NO: 173
ELPTQGTFSNVSTNVS
CD8 alpha stalk
SEQ ID NO: 174
CCCGCCCCAAGACCCCCCACACCTGCGCCGACCATTGCTTCTCAACCCC
TGAGTTTGAGACCCGAGGCCTGCCGGCCAGCTGCCGGCGGGGCCGTGCA
TACAAGAGGACTCGATTTCGCTTGCGAC
CD8 alpha stalk
SEQ ID NO: 175
PAPRPPTPAPTIASQPLSLRPEACRPAAGGAVHTRGLDFACD
CD8 alpha transmembrane region
SEQ ID NO: 176
ATCTATATCTGGGCACCTCTCGCTGGCACCTGTGGAGTCCTTCTGCTCA
GCCTGGTTATTACTCTGTACTGTAATCACCGGAATCGCCGCCGCGTTTG
TAAGTGTCCCAGG
CD8 alpha transmembrane region
SEQ ID NO: 177
IYIWAPLAGTCGVLLLSLVITLYCNHRNRRRVCKCPR
Linker
SEQ ID NO: 178
Ctcgag
Linker
SEQ ID NO: 179
LE
CD3 zeta cytoplasmic domain
SEQ ID NO: 180
AGAGTGAAGTTCAGCAGGAGCGCAGACGCCCCCGCGTACCAGCAGGGCC
AGAACCAGCTCTATAACGAGCTCAATCTAGGACGAAGAGAGGAGTACGA
TGTTTTGGACAAGAGACGTGGCCGGGACCCTGAGATGGGGGGAAAGCCG
AGAAGGAAGAACCCTCAGGAAGGCCTGTACAATGAACTGCAGAAAGATA
AGATGGCGGAGGCCTACAGTGAGATTGGGATGAAAGGCGAGCGCCGGAG
GGGCAAGGGGCACGATGGCCTTTACCAGGGTCTCAGTACAGCCACCAAG
GACACCTACGACGCCCTTCACATGCAGGCCCTGCCCCCTCGC
CD3 zeta cytoplasmic domain
SEQ ID NO: 181
RVKFSRSADAPAYQQGQNQLYNELNLGRREEYDVLDKRRGRDPEMGGKP
RRKNPQEGLYNELQKDKMAEAYSEIGMKGERRRGKGHDGLYQGLSTATK
DTYDALHMQALPPR

### Additional Sequences

SEQ ID NO: 182, CD28 nt
TTCTGGGTACTGGTTGTAGTCGGTGGCGTACTTGCTTGTTATTCTCTTC
TTGTTACCGTAGCCTTCATTATATTCTGGGTCCGATCAAAGCGCTCAAG
ACTCCTCCATTCCGATTATATGAACATGACACCTCGCCGACCTGGTCCT
ACACGCAAACATTATCAACCCTACGCACCCCCCCGAGACTTCGCTGCTT
ATCGATCC
SEQ ID NO: 183, CD28 aa
FWVLVVVGGVLACYSLLVTVAFIIFWVRSKRSRLLHSDYMNMTPRRPGP
TRKHYQPYAPPRDFAAYRS
SEQ ID NO: 184, OX40 nt
GTTGCCGCCATCCTGGGCCTGGGCCTGGTGCTGGGGCTGCTGGGCCCCC
TGGCCATCCTGCTGGCCCTGTACCTGCTCCGGGACCAGAGGCTGCCCCC
CGATGCCCACAAGCCCCCTGGGGGAGGCAGTTTCCGGACCCCCATCCAA
GAGGAGCAGGCCGACGCCCACTCCACCCTGGCCAAGATC
SEQ ID NO: 185, OX40 aa
VAAILGLGLVLGLLGPLAILLALYLLRRDQRLPPDAHKPPGGGSFRTPI
QEEQADAHSTLAKI
SEQ ID NO: 186, 4-1BB nt
AGTGTAGTTAAAAGAGGAAGAAAAAAGTTGCTGTATATATTTAAACAAC
CATTTATGAGACCAGTGCAAACCACCCAAGAAGAAGACGGATGTTCATG
CAGATTCCCAGAAGAAGAAGAAGGAGGATGTGAATTG
SEQ ID NO: 187, 4-1BB aa
SVVKRGRKKLLYIFKQPFMRPVQTTQEEDGCSCRFPEEEEGGCEL

### Expression of MyD88/CD40 Chimeric Antigen Receptors and Chimeric Stimulating Molecules

[0619] The following examples discuss the compositions and methods relating to MyD88/CD40 chimeric antigen receptors and chimeric stimulating molecules, as provided in this application. Also included are compositions and methods related to a Caspase-9-based safety switch, and its use in cells that express the MyD88/CD40 chimeric antigen receptors or chimeric stimulating molecules.

### Example 11

### Design and Activity of MyD88/CD40 Chimeric Antigen Receptors

### Design of MC-CAR Constructs

[0620] Based on the activation data from inducible MyD88/CD40 experiments, the potential of MC signaling in a CAR molecule in place of conventional endodomains (e.g., CD28 and 4-1BB) was examined. MC (without AP1903-binding FKBPv36 regions) was subcloned into the PSCA.ζ to emulate the position of the CD28 endodomain. Retrovirus was generated for each of the three constructs, transduced human T cells and subsequently measured transduction efficiency demonstrating that PSCA.MC.ζ could be expressed. To confirm that T cells bearing each of these CAR constructs retained their ability to recognize PSCA⁺ tumor cells, 6-hour cytotoxicity assays were performed, which showed lysis of Capan-1 target cells. Therefore, the addition of MC into the cytoplasmic region of a CAR molecule does not affect CAR expression or the recognition of antigen on target cells.

[0621] MC costimulation enhances T cell killing, proliferation and survival in CAR-modified T cells As demonstrated in short-term cytotoxicity assays, each of the three CAR designs showed the capacity to recognize and lyse Capan-1 tumor cells. Cytolytic effector function in effector T cells is mediated by the release of pre-formed granzymes and perforin following tumor recognition, and activation through CD3ζ is sufficient to induce this process without the need for costimulation. First generation CAR T cells (e.g., CARs constructed with only the CD3ζ cytoplasmic region) can lyse tumor cells; however, survival and proliferation is impaired due to lack of costimulation. Hence, the addition of CD28 or 4-1 BB co-stimulating domains constructs has significantly improved the survival and proliferative capacity of CAR T cells.

[0622] To examine whether MC can similarly provide costimulating signals affecting survival and proliferation, coculture assays were performed with PSCA⁺ Capan-1 tumor cells under high tumor:T cell ratios (1:1, 1:5, 1:10 T cell to tumor cell). When T cell and tumor cell numbers were equal (1:1), there was efficient killing of Capan-1-GFP cells from all three constructs compared to non-transduced control T cells. However, when the CAR T cells were challenged with high numbers of tumor cells (1:10), there was a significant reduction of Capan-1-GFP tumor cells only when the CAR molecule contained either MC or CD28.

[0623] To further examine the mechanism of costimulation by these two CARs cell viability and proliferation was assayed. PSCA CARs containing MC or CD28 showed improved survival compared to non-transduced T cells and the CD3ζ only CAR, and T cell proliferation by PSCA.MC.ζ and PSCA.28.ζ was significantly enhanced. As other groups have shown that CARs that contain co-stimulating signaling regions produce IL-2, a key survival and growth molecule for T cells (4), ELISAs were performed on supernatants from CAR T cells challenged with Capan-1 tumor cells. Although PSCA.28.ζ produced high levels of IL-2, PSCA.MC.ζ signaling also produced significant levels of IL-2, which likely contributes to the observed T cell survival and expansion in these assays. Additionally, IL-6 production by CAR-modified T cells was examined, as IL-6 has been implicated as a key cytokine in the potency and efficacy of CAR-modified T cells (15). In contrast to IL-2, PSCA.MC.ζ produced higher levels of IL-6 compared to PSCA.28.ζ, consistent with the observations that iMC activation in primary T cells induces IL-6. Together, these data suggest that co-stimulation through MC produces similar effects to that of CD28, whereby following tumor cell recognition, CAR-modified T cells produce IL-2 and IL-6, which enhance T cell survival

[0624] Immunotherapy using CAR-modified T cells holds great promise for the treatment of a variety of malignancies. While CARs were first designed with a single signaling domain (e.g., CD3, (16-19) clinical trials evaluating the feasibility of CAR immunotherapy showed limited clinical benefit. (1,2,20,21) This has been primarily attributed to the incomplete activation of T cells following tumor recognition, which leads to limited persistence and expansion in vivo. (22) To address this deficiency, CARs have been engineered to include another stimulating domain, often derived from the cytoplasmic portion of T cell costimulating molecules including CD28, 4-1 BB, OX40, ICOS and DAP10, (4, 23-30) which allow CAR T cells to receive appropriate costimulation upon engagement of the target antigen. Indeed, clinical trials conducted with anti-CD19 CARs bearing CD28 or 4-1 BB signaling domains for the treatment of refractory acute lymphoblastic leukemia (ALL) have demonstrated impressive T cell persistence, expansion and serial tumor killing following adoptive transfer. (6-8)

[0625] CD28 costimulation provides a clear clinical advantage for the treatment of CD19⁺ lymphomas. Savoldo and colleagues conducted a CAR-T cell clinical trial comparing first (CD19.ζ and second generation CARs (CD19.28.ζ) and found that CD28 enhanced T cell persistence and expansion following adoptive transfer.31 One of the principal functions of second generation CARs is the ability to produce IL-2 that supports T cell survival and growth through activation of the NFAT transcription factor by CD3ζ (signal 1), and NF-κB (signal 2) by CD28 or 4-1BB.32 This suggested other molecules that similarly activated NF-κB might be paired with the CD3 chain within a CAR molecule. Our approach has employed a T cell costimulating molecule that was originally developed as an adjuvant for a dendritic cell (DC) vaccine. (12,33) For full activation or licensing of DCs, TLR signaling is usually involved in the upregulation of the TNF family member, CD40, which interacts with CD40L on antigen-primed CD4⁺ T cells. Because iMC was a potent activator of NF-κB in DCs, transduction of T cells with CARs that incorporated MyD88 and CD40 might provide the required costimulation (signal 2) to T cells, and enhance their survival and proliferation.

[0626] A set of experiments was performed to examine whether MyD88, CD40 or both components were required for optimum T cell stimulation using the iMC molecule. Remarkably, it was found that neither MyD88 nor CD40 could sufficiently induce T cell activation, as measured by cytokine production (IL-2 and IL-6), but when combined as a single fusion protein, could induce potent T cell activation. A PSCA CAR incorporating MC was constructed and subsequently compared its function against a first (PSCA.ζ and second generation (PSCA.28.ζ CAR. Here it was found that MC enhanced survival and proliferation of CAR T cells to a comparable level as the CD28 endodomain, suggesting that costimulation was sufficient. While PSCA.MC.ζ CAR-transduced T cells produced lower levels of IL-2 than PSCA.28.ζ the secreted levels were significantly higher than non-transduced T cells and T cells transduced with the PSCA.ζ CAR. On the other hand, PSCA.MC.ζ CAR-transduced T cells secreted significantly higher levels of IL-6, an important cytokine associated with T cell activation, than PSCA.28.ζ transduced T cells, indicating that MC conferred unique properties to CAR function that may translate to improved tumor cell killing in vivo. These experiments indicate that MC can activate NF-κB (signal 2) following antigen recognition by the extracellular CAR domain.

[0627] Design and functional validation of MC-CAR. Three PSCA CAR constructs were designed incorporating only CD3ζ, or with CD28 or MC endodomains. Transduction efficiency (percentage) was measured by anti-CAR-APC (recognizing the IgG1 CH₂CH₃ domain). C) Flow cytometry analysis demonstrating high transduction efficiency of T cells with PSCA.MC.ζ CAR. D) Analysis of specific lysis of PSCA⁺ Capan-1 tumor cells by CAR-modified T cells in a 6 hour LDH release assay at a ratio of 1:1 T cells to tumor cells.

[0628] MC-CAR modified T cells kill Capan-1 tumor cells in long-term coculture assays. Flow cytometric analysis of CAR-modified and non-transduced T cells cultured with Capan-1-GFP tumor cells after 7 days in culture at a 1:1 ratio. Quantitation of viable GFP⁺ cells by flow cytometry in coculture assays at a 1:1 and 1:10 T cell to tumor cell ratio.

[0629] MC and CD28 costimulation enhance T cell survival, proliferation and cytokine production. T cells isolated from 1:10 T cell to tumor cell coculture assays were assayed for cell viability and cell number to assess survival and proliferation in response to tumor cell exposure. Supernatants from coculture assays were subsequently measured for IL-2 and IL-6 production by ELISA.

[0630] Design of inducible costimulating molecules and effect on T cell activation. Four vectors were designed incorporating FKBPv36 AP1903-binding domains (Fv′.Fv) alone, or with MyD88, CD40 or the MyD88/CD40 fusion protein. Transduction efficiency of primary activated T cells using CD3⁺CD19⁺ flow cytometric analysis. Analysis of IFN-γ production of modified T cells following activation with and without 10 nM AP1903. Analysis of IL-6 production of modified T cells following activation with and without 10 nM AP1903.

[0631] Apart from survival and growth advantages, MC-induced costimulation may also provide additional functions to CAR-modified T cells. Medzhitov and colleagues recently demonstrated that MyD88 signaling was critical for both Th1 and Th17 responses and that it acted via IL-1 to render CD4⁺ T cells refractory to regulatory T cell (Treg)-driven inhibition. (34) Experiments with iMC show that IL-1α and β are secreted following AP1903 activation. In addition, Martin et al demonstrated that CD40 signaling in CD8⁺ T cells via Ras, PI3K and protein kinase C, result in NF-κB-dependent induction of cytotoxic mediators granzyme and perforin that lyse CD4⁺CD25⁺ Treg cells (35). Thus, MyD88 and CD40 co-activation may render CAR-T cells resistant to the immunosuppressive effects of Treg cells, a function that could be critically important in the treatment of solid tumors and other types of cancers.

[0632] In summary, MC can be incorporated into a CAR molecule and primary T cells transduced with retrovirus can express PSCA.MC.ζ without overt toxicity or CAR stability issues. Further, MC appears to provide similar costimulation to that of CD28, where transduced T cells show improved survival, proliferation and tumor killing compared to T cells transduced with a first generation CAR.

### Example 12

### References

[0633] The following references are cited in, or provide additional information that may be relevant, including, for example, in Example 11.
[0634] 1. Till B G, Jensen M C, Wang J, et al: CD20-specific adoptive immunotherapy for lymphoma using a chimeric antigen receptor with both CD28 and 4-1 BB domains: pilot clinical trial results. Blood 119:3940-50, 2012.
[0635] 2. Pule M A, Savoldo B, Myers G D, et al: Virus-specific T cells engineered to coexpress tumor-specific receptors: persistence and antitumor activity in individuals with neuroblastoma. Nat Med 14:1264-70, 2008.
[0636] 3. Kershaw M H, Westwood J A, Parker L L, et al: A phase 1 study on adoptive immunotherapy using gene-modified T cells for ovarian cancer. Clin Cancer Res 12:6106-15, 2006.
[0637] 4. Carpenito C, Milone M C, Hassan R, et al: Control of large, established tumor xenografts with genetically retargeted human T cells containing CD28 and CD137 domains. Proc Natl Acad Sci USA 106:3360-5, 2009.
[0638] 5. Song D G, Ye Q, Poussin M, et al: CD27 costimulation augments the survival and antitumor activity of redirected human T cells in vivo. Blood 119:696-706, 2012.
[0639] 6. Kalos M, Levine B L, Porter D L, et al: T cells with chimeric antigen receptors have potent antitumor effects and can establish memory in patients with advanced leukemia. Sci Transl Med 3:95ra73, 2011.
[0640] 7. Porter D L, Levine B L, Kalos M, et al: Chimeric antigen receptor-modified T cells in chronic lymphoid leukemia. N Engl J Med 365:725-33, 2011.
[0641] 8. Brentjens R J, Davila M L, Riviere I, et al: CD19-targeted T cells rapidly induce molecular remissions in adults with chemotherapy-refractory acute lymphoblastic leukemia. Sci Transl Med 5:177ra38, 2013.
[0642] 9. Pule M A, Straathof K C, Dotti G, et al: A chimeric T cell antigen receptor that augments cytokine release and supports clonal expansion of primary human T cells. Mol Ther 12:933-41, 2005.
[0643] 10. Finney H M, Akbar A N, Lawson A D: Activation of resting human primary T cells with chimeric receptors: costimulation from CD28, inducible costimulator, CD134, and CD137 in series with signals from the TCR zeta chain. J Immunol 172:104-13, 2004.
[0644] 11. Guedan S, Chen X, Madar A, et al: ICOS-based chimeric antigen receptors program bipolar TH17/TH1 cells. Blood, 2014.
[0645] 12. Narayanan P, Lapteva N, Seethammagari M, et al: A composite MyD88/CD40 switch synergistically activates mouse and human dendritic cells for enhanced antitumor efficacy. J Clin Invest 121:1524-34, 2011.
[0646] 13. Anurathapan U, Chan R C, Hindi H F, et al: Kinetics of tumor destruction by chimeric antigen receptor-modified T cells. Mol Ther 22:623-33, 2014.
[0647] 14. Craddock J A, Lu A, Bear A, et al: Enhanced tumor trafficking of GD2 chimeric antigen receptor T cells by expression of the chemokine receptor CCR2b. J Immunother 33:780-8, 2010.
[0648] 15. Lee D W, Gardner R, Porter D L, et al: Current concepts in the diagnosis and management of cytokine release syndrome. Blood 124:188-95, 2014.
[0649] 16. Becker M L, Near R, Mudgett-Hunter M, et al: Expression of a hybrid immunoglobulin-T cell receptor protein in transgenic mice. Cell 58:911-21, 1989.
[0650] 17. Goverman J, Gomez S M, Segesman K D, et al: Chimeric immunoglobulin-T cell receptor proteins form functional receptors: implications for T cell receptor complex formation and activation. Cell 60:929-39, 1990.
[0651] 18. Gross G, Waks T, Eshhar Z: Expression of immunoglobulin-T-cell receptor chimeric molecules as functional receptors with antibody-type specificity. Proc Natl Acad Sci USA 86:10024-8, 1989.
[0652] 19. Kuwana Y, Asakura Y, Utsunomiya N, et al: Expression of chimeric receptor composed of immunoglobulin-derived V regions and T-cell receptor-derived C regions. Biochem Biophys Res Commun 149:960-8, 1987.
[0653] 20. Jensen M C, Popplewell L, Cooper L J, et al: Antitransgene rejection responses contribute to attenuated persistence of adoptively transferred CD20/CD19-specific chimeric antigen receptor redirected T cells in humans. Biol Blood Marrow Transplant 16:1245-56, 2010.
[0654] 21. Park J R, Digiusto D L, Slovak M, et al: Adoptive transfer of chimeric antigen receptor re-directed cytolytic T lymphocyte clones in patients with neuroblastoma. Mol Ther 15:825-33, 2007.
[0655] 22. Ramos C A, Dotti G: Chimeric antigen receptor (CAR)-engineered lymphocytes for cancer therapy. Expert Opin Biol Ther 11:855-73, 2011.
[0656] 23. Finney H M, Lawson A D, Bebbington C R, et al: Chimeric receptors providing both primary and costimulatory signaling in T cells from a single gene product. J Immunol 161:2791-7, 1998.
[0657] 24. Hombach A, Weczarkowiecz A, Marquardt T, et al: Tumor-specific T cell activation by recombinant immunoreceptors: CD3 zeta signaling and CD28 costimulation are simultaneously required for efficient IL-2 secretion and can be integrated into one combined CD28/CD3 zeta signaling receptor molecule. J Immunol 167:6123-31, 2001.
[0658] 25. Maher J, Brentjens R J, Gunset G, et al: Human T-lymphocyte cytotoxicity and proliferation directed by a single chimeric TCRzeta/CD28 receptor. Nat Biotechnol 20:70-5, 2002.
[0659] 26. Imai C, Mihara K, Andreansky M, et al: Chimeric receptors with 4-1 BB signaling capacity provoke potent cytotoxicity against acute lymphoblastic leukemia. Leukemia 18:676-84, 2004.
[0660] 27. Wang J, Jensen M, Lin Y, et al: Optimizing adoptive polyclonal T cell immunotherapy of lymphomas, using a chimeric T cell receptor possessing CD28 and CD137 costimulatory domains. Hum Gene Ther 18:712-25, 2007.
[0661] 28. Zhao Y, Wang Q J, Yang S, et al: A herceptin-based chimeric antigen receptor with modified signaling domains leads to enhanced survival of transduced T lymphocytes and antitumor activity. J Immunol 183:5563-74, 2009.
[0662] 29. Milone M C, Fish J D, Carpenito C, et al: Chimeric receptors containing CD137 signal transduction domains mediate enhanced survival of T cells and increased antileukemic efficacy in vivo. Mol Ther 17:1453-64, 2009.
[0663] 30. Yvon E, Del Vecchio M, Savoldo B, et al: Immunotherapy of metastatic melanoma using genetically engineered GD2-specific T cells. Clin Cancer Res 15:5852-60, 2009.
[0664] 31. Savoldo B, Ramos C A, Liu E, et al: CD28 costimulation improves expansion and persistence of chimeric antigen receptor-modified T cells in lymphoma patients. J Clin Invest 121:1822-6, 2011.
[0665] 32. Kalinski P, Hilkens C M, Werenga E A, et al: T-cell priming by type-1 and type-2 polarized dendritic cells: the concept of a third signal. Immunol Today 20:561-7, 1999.
[0666] 33. Kemnade J O, Seethammagari M, Narayanan P, et al: Off-the-shelf Adenoviral-mediated Immunotherapy via Bicistronic Expression of Tumor Antigen and iMyD88/CD40 Adjuvant. Mol Ther, 2012.
[0667] 34. Schenten D, Nish S A, Yu S, et al: Signaling through the adaptor molecule MyD88 in CD4⁺ T cells is required to overcome suppression by regulatory T cells. Immunity 40:78-90, 2014.
[0668] 35. Martin S, Pahari S, Sudan R, et al: CD40 signaling in CD8⁺CD40⁺ T cells turns on contra-T regulatory cell functions. J Immunol 184:5510-8, 2010

### Example 13

### MC Costimulation Enhances Function and Proliferation of CD19 CARs

[0669] Experiments similar to those discussed herein, are provided, using an antigen recognition moiety that recognizes the CD19 antigen. It is understood that the vectors provided herein may be modified to construct a MyD88/CD40 CAR construct that targets CD19⁺ tumor cells, which also incorporates an inducible Caspase-9 safety switch.

[0670] To examine whether MC costimulation functioned in CARs targeting other antigens, T cells were modified with either CD19.ζ or with CD19.MC.ζ. The cytotoxicity, activation and survival against CD19+ Burkitt's lymphoma cell lines (Raji and Daudi) of the modified cells were assayed. In coculture assays, T cells transduced with either CAR showed killing of CD19+ Raji cells at an effector to target ratio as low as 1:1. However, analysis of cytokine production from co-culture assays showed that CD19.MC.ζ transduced T cells produced higher levels of IL-2 and IL-6 compared to CD19.ζ, which is consistent with the costimulatory effects observed with iMC and PSCA CARs containing the MC signaling domain. Further, T cells transduced with CD19.MC.ζ showed enhanced proliferation following activation by Raji tumor cells. These data support earlier experiments demonstrating that MC signaling in CAR molecules improves T cell activation, survival and proliferation following ligation to a target antigen expressed on tumor cells.

pBP0526-SFG.iCasp9 wt.2A.CD19scFv.CD34e.CD8stm.MC.zeta

FKBPv36
SEQ ID NO: 321
ATGCTGGAGGGAGTGCAGGTGGAGACTATTAGCCCCGGAGATGGCAGAA
CATTCCCCAAAAGAGGACAGACTTGCGTCGTGCATTATACTGGAATGCT
GGAAGACGGCAAGAAGGTGGACAGCAGCCGGGACCGAAACAAGCCCTTC
AAGTTCATGCTGGGGAAGCAGGAAGTGATCCGGGGCTGGGAGGAAGGAG
TCGCACAGATGTCAGTGGGACAGAGGGCCAAACTGACTATTAGCCCAGA
CTACGCTTATGGAGCAACCGGCCACCCCGGGATCATTCCCCCTCATGCT
ACACTGGTCTTCGATGTGGAGCTGCTGAAGCTGGAA
FKBPv36
SEQ ID NO: 322
MLEGVQVETISPGDGRTFPKRGQTCVVHYTGMLEDGKKVDSSRDRNKPF
KFMLGKQEVIRGWEEGVAQMSVGQRAKLTISPDYAYGATGHPGIIPPHA
TLVFDVELLKLE
Linker
SEQ ID NO: 323
AGCGGAGGAGGATCCGGA
Linker
SEQ ID NO: 324
SGGGSG
Caspase-9
SEQ ID NO: 325
GTGGACGGGTTTGGAGATGTGGGAGCCCTGGAATCCCTGCGGGGCAATG
CCGATCTGGCTTACATCCTGTCTATGGAGCCTTGCGGCCACTGTCTGAT
CATTAACAATGTGAACTTCTGCAGAGAGAGCGGGCTGCGGACCAGAACA
GGATCCAATATTGACTGTGAAAAGCTGCGGAGAAGGTTCTCTAGTCTGC
ACTTTATGGTCGAGGTGAAAGGCGATCTGACCGCTAAGAAAATGGTGCT
GGCCCTGCTGGAACTGGCTCGGCAGGACCATGGGGCACTGGATTGCTGC
GTGGTCGTGATCCTGAGTCACGGCTGCCAGGCTTCACATCTGCAGTTCC
CTGGGGCAGTCTATGGAACTGACGGCTGTCCAGTCAGCGTGGAGAAGAT
CGTGAACATCTTCAACGGCACCTCTTGCCCAAGTCTGGGCGGGAAGCCC
AAACTGTTCTTTATTCAGGCCTGTGGAGGCGAGCAGAAAGATCACGGCT
TCGAAGTGGCTAGCACCTCCCCCGAGGACGAATCACCTGGAAGCAACCC
TGAGCCAGATGCAACCCCCTTCCAGGAAGGCCTGAGGACATTTGACCAG
CTGGATGCCATCTCAAGCCTGCCCACACCTTCTGACATTTTCGTCTCTT
ACAGTACTTTCCCTGGATTTGTGAGCTGGCGCGATCCAAAGTCAGGCAG
CTGGTACGTGGAGACACTGGACGATATCTTTGAGCAGTGGGCCCATTCT
GAAGACCTGCAGAGTCTGCTGCTGCGAGTGGCCAATGCTGTCTCTGTGA
AGGGGATCTACAAACAGATGCCAGGATGCTTCAACTTTCTGAGAAAGAA
ACTGTTCTTTAAGACCTCCGCATCTAGGGCC
Caspase-9
SEQ ID NO: 326
VDGFGDVGALESLRGNADLAYILSMEPCGHCLIINNVNFCRESGLRTRT
GSNIDCEKLRRRFSSLHFMVEVKGDLTAKKMVLALLELARQDHGALDCC
VVVILSHGCQASHLQFPGAVYGTDGCPVSVEKIVNIFNGTSCPSLGGKP
KLFFIQACGGEQKDHGFEVASTSPEDESPGSNPEPDATPFQEGLRTFDQ
LDAISSLPTPSDIFVSYSTFPGFVSWRDPKSGSWYVETLDDIFEQWAHS
EDLQSLLLRVANAVSVKGIYKQMPGCFNFLRKKLFFKTSASRA
Linker
SEQ ID NO: 327
CCGCGG
Linker
SEQ ID NO: 328
PR
T2A
SEQ ID NO: 329
GAAGGCCGAGGGAGCCTGCTGACATGTGGCGATGTGGAGGAAAACCCAG
GACCA
T2A
SEQ ID NO: 330
EGRGSLLTCGDVEENPGP
Linker
SEQ ID NO: 331
CCATGG
Linker
SEQ ID NO: 332
PW
Signal peptide
SEQ ID NO: 333
ATGGAGTTTGGACTTTCTTGGTTGTTTTTGGTGGCAATTCTGAAGGGTG
TCCAGTGTAGCAGG
Signal peptide
SEQ ID NO: 334
MEFGLSWLFLVAILKGVQCSR
FMC63 variable light chain (anti-CD19)
SEQ ID NO: 335
GACATCCAGATGACACAGACTACATCCTCCCTGTCTGCCTCTCTGGGAG
ACAGAGTCACCATCAGTTGCAGGGCAAGTCAGGACATTAGTAAATATTT
AAATTGGTATCAGCAGAAACCAGATGGAACTGTTAAACTCCTGATCTAC
CATACATCAAGATTACACTCAGGAGTCCCATCAAGGTTCAGTGGCAGTG
GGTCTGGAACAGATTATTCTCTCACCATTAGCAACCTGGAGCAAGAAGA
TATTGCCACTTACTTTTGCCAACAGGGTAATACGCTTCCGTACACGTTC
GGAGGGGGGACTAAGTTGGAAATAACA
FMC63 variable light chain (anti CD19)
SEQ ID NO: 336
DIQMTQTTSSLSASLGDRVTISCRASQDISKYLNWYQQKPDGTVKLLIY
HTSRLHSGVPSRFSGSGSGTDYSLTISNLEQEDIATYFCQQGNTLPYTF
GGGTKLEIT
Flexible linker
SEQ ID NO: 337
GGCGGAGGAAGCGGAGGTGGGGGC
Flexible linker
SEQ ID NO: 338
GGGSGGGG
FMC63 variable heavy chain (anti-CD19)
SEQ ID NO: 339
GAGGTGAAACTGCAGGAGTCAGGACCTGGCCTGGTGGCGCCCTCACAGA
GCCTGTCCGTCACATGCACTGTCTCAGGGGTCTCATTACCCGACTATGG
TGTAAGCTGGATTCGCCAGCCTCCACGAAAGGGTCTGGAGTGGCTGGGA
GTAATATGGGGTAGTGAAACCACATACTATAATTCAGCTCTCAAATCCA
GACTGACCATCATCAAGGACAACTCCAAGAGCCAAGTTTTCTTAAAAAT
GAACAGTCTGCAAACTGATGACACAGCCATTTACTACTGTGCCAAACAT
TATTACTACGGTGGTAGCTATGCTATGGACTACTGGGGTCAAGGAACCT
CAGTCACCGTCTCCTCA
FMC63 variable heavy chain (anti CD19)
SEQ ID NO: 340
EVKLQESGPGLVAPSQSLSVTCTVSGVSLPDYGVSWIRQPPRKGLEWLG
VIWGSETTYYNSALKSRLTIIKDNSKSQVFLKMNSLQTDDTAIYYCAKH
YYYGGSYAMDYWGQGTSVTVSS
Linker
SEQ ID NO: 341
GGATCC
Linker
SEQ ID NO: 342
GS
CD34 minimal epitope
SEQ ID NO: 343
GAACTTCCTACTCAGGGGACTTTCTCAAACGTTAGCACAAACGTAAGT
CD34 minimal epitope
SEQ ID NO: 344
ELPTQGTFSNVSTNVS
CD8 α stalk domain
SEQ ID NO: 345
CCCGCCCCAAGACCCCCCACACCTGCGCCGACCATTGCTTCTCAACCCC
TGAGTTTGAGACCCGAGGCCTGCCGGCCAGCTGCCGGCGGGGCCGTGCA
TACAAGAGGACTCGATTTCGCTTGCGAC
CD8 α stalk domain
SEQ ID NO: 346
PAPRPPTPAPTIASQPLSLRPEACRPAAGGAVHTRGLDFACD
CD8 α transmembrane domain
SEQ ID NO: 347
ATCTATATCTGGGCACCTCTCGCTGGCACCTGTGGAGTCCTTCTGCTCA
GCCTGGTTATTACTCTGTACTGTAATCACCGGAATCGCCGCCGCGTTTG
TAAGTGTCCCAGG
CD8 α transmembrane domain
SEQ ID NO: 348
IYIWAPLAGTCGVLLLSLVITLYCNHRNRRRVCKCPR
Linker
SEQ ID NO: 349
GTCGAC
Linker
SEQ ID NO: 350
VD
Truncated MyD88 lacking the TIR domain
SEQ ID NO: 351
ATGGCCGCTGGGGGCCCAGGCGCCGGATCAGCTGCTCCCGTATCTTCTA
CTTCTTCTTTGCCGCTGGCTGCTCTGAACATGCGCGTGAGAAGACGCCT
CTCCCTGTTCCTTAACGTTCGCACACAAGTCGCTGCCGATTGGACCGCC
CTTGCCGAAGAAATGGACTTTGAATACCTGGAAATTAGACAACTTGAAA
CACAGGCCGACCCCACTGGCAGACTCCTGGACGCATGGCAGGGAAGACC
TGGTGCAAGCGTTGGACGGCTCCTGGATCTCCTGACAAAACTGGGACGC
GACGACGTACTGCTTGAACTCGGACCTAGCATTGAAGAAGACTGCCAAA
AATATATCCTGAAACAACAACAAGAAGAAGCCGAAAAACCTCTCCAAGT
CGCAGCAGTGGACTCATCAGTACCCCGAACAGCTGAGCTTGCTGGGATT
ACTACACTCGACGACCCACTCGGACATATGCCTGAAAGATTCGACGCTT
TCATTTGCTATTGCCCCTCTGACATA
Truncated MyD88 lacking the TIR domain
SEQ ID NO: 352
MAAGGPGAGSAAPVSSTSSLPLAALNMRVRRRLSLFLNVRTQVAADWTA
LAEEMDFEYLEIRQLETQADPTGRLLDAWQGRPGASVGRLLDLLTKLGR
DDVLLELGPSIEEDCQKYILKQQQEEAEKPLQVAAVDSSVPRTAELAGI
TTLDDPLGHMPERFDAFICYCPSDI
CD40 without the extracellular domain
SEQ ID NO: 353
AAGAAAGTTGCAAAGAAACCCACAAATAAAGCCCCACACCCTAAACAGG
AACCCCAAGAAATCAATTTCCCAGATGATCTCCCTGGATCTAATACTGC
CGCCCCGGTCCAAGAAACCCTGCATGGTTGCCAGCCTGTCACCCAAGAG
GACGGAAAAGAATCACGGATTAGCGTACAAGAGAGACAA
CD40 without the extracellular domain
SEQ ID NO: 354
KKVAKKPTNKAPHPKQEPQEINFPDDLPGSNTAAPVQETLHGCQPVTQE
DGKESRISVQERQ
CD3 zeta
SEQ ID NO: 355
AGAGTGAAGTTCAGCAGGAGCGCAGACGCCCCCGCGTACCAGCAGGGCC
AGAACCAGCTCTATAACGAGCTCAATCTAGGACGAAGAGAGGAGTACGA
TGTTTTGGACAAGAGACGTGGCCGGGACCCTGAGATGGGGGGAAAGCCG
AGAAGGAAGAACCCTCAGGAAGGCCTGTACAATGAACTGCAGAAAGATA
AGATGGCGGAGGCCTACAGTGAGATTGGGATGAAAGGCGAGCGCCGGAG
GGGCAAGGGGCACGATGGCCTTTACCAGGGTCTCAGTACAGCCACCAAG
GACACCTACGACGCCCTTCACATGCAGGCCCTGCCCCCTCGC
CD3 zeta
SEQ ID NO: 356
RVKFSRSADAPAYQQGQNQLYNELNLGRREEYDVLDKRRGRDPEMGGKP
RRKNPQEGLYNELQKDKMAEAYSEIGMKGERRRGKGHDGLYQGLSTATK
DTYDALHMQALPPR

### Example 14

### Cytokine Production of T Cells Co-expressing a MyD88/CD40 Chimeric Antigen Receptor and Inducible Caspase-9 Polypeptide

[0671] Various chimeric antigen receptor constructs were created to compare cytokine production of transduced T cells after exposure to antigen. The chimeric antigen receptor constructs all had an antigen recognition region that bound to CD19. It is understood that the vectors provided herein may be modified to construct a CAR construct that also incorporates an inducible Caspase-9 safety switch. It is further understood that the CAR construct may further comprise an FRB domain.

### Example 15

### An example of a MyD88/CD40 CAR Construct for Targeting Her2⁺ Tumor Cells

[0672] It is understood that the vectors provided herein may be modified to construct a MyD88/CD40 CAR construct that targets Her2⁺ tumor cells, which also incorporates an inducible Caspase-9 safety switch. It is further understood that the CAR construct may further comprise an FRB domain.

### SFG-Her2scFv.CD34e.CD8stm.MC.Zeta Sequence

Signal peptide
SEQ ID NO: 357
ATGGAGTTTGGACTTTCTTGGTTGTTTTTGGTGGCAATTCTGAAGGGTG
TCCAGTGTAGCAGG
Signal peptide
SEQ ID NO: 358
MEFGLSWLFLVAILKGVQCSR
FRP5 variable light chain (anti-Her2)
SEQ ID NO: 359
GACATCCAATTGACACAATCACACAAATTTCTCTCAACTTCTGTAGGAG
ACAGAGTGAGCATAACCTGCAAAGCATCCCAGGACGTGTACAATGCTGT
GGCTTGGTACCAACAGAAGCCTGGACAATCCCCAAAATTGCTGATTTAT
TCTGCCTCTAGTAGGTACACTGGGGTACCTTCTCGGTTTACGGGCTCTG
GGTCCGGACCAGATTTCACGTTCACAATCAGTTCCGTTCAAGCTGAAGA
CCTCGCTGTTTATTTTTGCCAGCAGCACTTCCGAACCCCTTTTACTTTT
GGCTCAGGCACTAAGTTGGAAA
TCAAGGCTTTG
FRP5 variable light chain (anti-Her2)
SEQ ID NO: 360
DIQLTQSHKFLSTSVGDRVSITCKASQDVYNAVAWYQQKPGQSPKWYSA
SSRYTGVPSRFTGSGSGPDFTFTISSVQAEDLAVYFCQQHFRTPFTFGS
GTKLEIKAL
Flexible linker
SEQ ID NO: 361
GGCGGAGGAAGCGGAGGTGGGGGC
Flexible linker
SEQ ID NO: 362
GGGSGGGG
FRP5 variable heavy chain (anti-Her2/Neu)
SEQ ID NO: 363
GAAGTCCAATTGCAACAGTCAGGCCCCGAATTGAAAAAGCCCGGCGAAA
CAGTGAAGATATCTTGTAAAGCCTCCGGTTACCCTTTTACGAACTATGG
AATGAACTGGGTCAAACAAGCCCCTGGACAGGGATTGAAGTGGATGGGA
TGGATCAATACATCAACAGGCGAGTCTACCTTCGCAGATGATTTCAAAG
GTCGCTTTGACTTCTCACTGGAGACCAGTGCAAATACCGCCTACCTTCA
GATTAACAATCTTAAAAGCGAGGATATGGCAACCTACTTTTGCGCAAGA
TGGGAAGTTTATCACGGGTACGTGCCATACTGGGGACAAGGAACGACAG
TGACAGTTAGTAGC
FRP5 variable heavy chain (anti-Her2/Neu)
SEQ ID NO: 364
EVQLQQSGPELKKPGETVKISCKASGYPFTNYGMNWVKQAPGQGLKWMG
WINTSTGESTFADDFKGRFDFSLETSANTAYLQINNLKSEDMATYFCAR
WEVYHGYVPYWGQGTTVTVSS
Linker
SEQ ID NO: 365
GGATCC
Linker
SEQ ID NO: 366
GS
CD34 minimal epitope
SEQ ID NO: 367
GAACTTCCTACTCAGGGGACTTTCTCAAACGTTAGCACAAACGTAAGT
CD34 minimal epitope
SEQ ID NO: 368
ELPTQGTFSNVSTNVS
CD8 alpha stalk
SEQ ID NO: 369
CCCGCCCCAAGACCCCCCACACCTGCGCCGACCATTGCTTCTCAACCCC
TGAGTTTGAGACCCGAGGCCTGCCGGCCAGCTGCCGGCGGGGCCGTGCA
TACAAGAGGACTCGATTTCGCTTGCGAC
CD8 alpha stalk
SEQ ID NO: 370
PAPRPPTPAPTIASQPLSLRPEACRPAAGGAVHTRGLDFACD
CD8 alpha transmembrane region
SEQ ID NO: 371
ATCTATATCTGGGCACCTCTCGCTGGCACCTGTGGAGTCCTTCTGCTCA
GCCTGGTTATTACTCTGTACTGTAATCACCGGAATCGCCGCCGCGTTTG
TAAGTGTCCCAGG
CD8 alpha transmembrane region
SEQ ID NO: 372
IYIWAPLAGTCGVLLLSLVITLYCNHRNRRRVCKCPR
Linker
SEQ ID NO: 373
Ctcgag
Linker
SEQ ID NO: 374
LE
Truncated MyD88
SEQ ID NO: 375
ATGGCCGCTGGGGGCCCAGGCGCCGGATCAGCTGCTCCCGTATCTTCTA
CTTCTTCTTTGCCGCTGGCTGCTCTGAACATGCGCGTGAGAAGACGCCT
CTCCCTGTTCCTTAACGTTCGCACACAAGTCGCTGCCGATTGGACCGCC
CTTGCCGAAGAAATGGACTTTGAATACCTGGAAATTAGACAACTTGAAA
CACAGGCCGACCCCACTGGCAGACTCCTGGACGCATGGCAGGGAAGACC
TGGTGCAAGCGTTGGACGGCTCCTGGATCTCCTGACAAAACTGGGACGC
GACGACGTACTGCTTGAACTCGGACCTAGCATTGAAGAAGACTGCCAAA
AATATATCCTGAAACAACAACAAGAAGAAGCCGAAAAACCTCTCCAAGT
CGCAGCAGTGGACTCATCAGTACCCCGAACAGCTGAGCTTGCTGGGATT
ACTACACTCGACGACCCACTCGGACATATGCCTGAAAGATTCGACGCTT
TCATTTGCTATTGCCCCTCTGACATA
Truncated MyD88
SEQ ID NO: 376
MAAGGPGAGSAAPVSSTSSLPLAALNMRVRRRLSLFLNVRTQVAADWTA
LAEEMDFEYLEIRQLETQADPTGRLLDAWQGRPGASVGRLLDLLTKLGR
DDVLLELGPSIEEDCQKYILKQQQEEAEKPLQVAAVDSSVPRTAELAGI
TTLDDPLGHMPERFDAFICYCPSDI
CD40 cytoplasmic domain
SEQ ID NO: 377
AAGAAAGTTGCAAAGAAACCCACAAATAAAGCCCCACACCCTAAACAGG
AACCCCAAGAAATCAATTTCCCAGATGATCTCCCTGGATCTAATACTGC
CGCCCCGGTCCAAGAAACCCTGCATGGTTGCCAGCCTGTCACCCAAGAG
GACGGAAAAGAATCACGGATTAGCGTACAAGAGAGACAA
CD40 cytoplasmic domain
SEQ ID NO: 378
KKVAKKPTNKAPHPKQEPQEINFPDDLPGSNTAAPVQETLHGCQPVTQE
DGKESRISVQERQ
Linker
SEQ ID NO: 379
gcggccgcagtcgag
Linker
SEQ ID NO: 380
AAAVE
CD3 zeta cytoplasmic domain
SEQ ID NO: 381
AGAGTGAAGTTCAGCAGGAGCGCAGACGCCCCCGCGTACCAGCAGGGCC
AGAACCAGCTCTATAACGAGCTCAATCTAGGACGAAGAGAGGAGTACGA
TGTTTTGGACAAGAGACGTGGCCGGGACCCTGAGATGGGGGGAAAGCCG
AGAAGGAAGAACCCTCAGGAAGGCCTGTACAATGAACTGCAGAAAGATA
AGATGGCGGAGGCCTACAGTGAGATTGGGATGAAAGGCGAGCGCCGGAG
GGGCAAGGGGCACGATGGCCTTTACCAGGGTCTCAGTACAGCCACCAAG
GACACCTACGACGCCCTTCACATGCAGGCCCTGCCCCCTCGC
CD3 zeta cytoplasmic domain
SEQ ID NO: 382
RVKFSRSADAPAYQQGQNQLYNELNLGRREEYDVLDKRRGRDPEMGGKP
RRKNPQEGLYNELQKDKMAEAYSEIGMKGERRRGKGHDGLYQGLSTATK
DTYDALHMQALPPR

### Example 16

### Additional Sequences

SEQ ID NO: 383, ΔCasp9 (res. 135-416)
GFGDVGALESLRGNADLAYILSMEPCGHCLIINNVN
FCRESGLRTRTGSNIDCEKLRRRFSSLHFMVEVKGD
LTAKKMVLALLELARQDHGALDCCVVVILSHGCQAS
HLQFPGAVYGTDGCPVSVEKIVNIFNGTSCPSLGGK
PKLFFIQACGGEQKDHGFEVASTSPEDESPGSNPEP
DATPFQEGLRTFDQLDAISSLPTPSDIFVSYSTFPGF
VSWRDPKSGSWYVETLDDIFEQWAHSEDLQSLLLR
VANAVSVKGIYKQMPGCFNFLRKKLFFKTS
SEQ ID NO: 384, ΔCasp9 (res. 135-416) D330A,
nucleotide sequence
GGATTTGGTGATGTCGGTGCTCTTGAGAGTTTGAGGGGAAATGCAGATT
TGGCTTACATCCTGAGCATGGAGCCCTGTGGCCACTGCCTCATTATCAA
CAATGTGAACTTCTGCCGTGAGTCCGGGCTCCGCACCCGCACTGGCTCC
AACATCGACTGTGAGAAGTTGCGGCGTCGCTTCTCCTCGCTGCATTTCA
TGGTGGAGGTGAAGGGCGACCTGACTGCCAAGAAAATGGTGCTGGCTTT
GCTGGAGCTGGCGCgGCAGGACCACGGTGCTCTGGACTGCTGCGTGGTG
GTCATTCTCTCTCACGGCTGTCAGGCCAGCCACCTGCAGTTCCCAGGGG
CTGTCTACGGCACAGATGGATGCCCTGTGTCGGTCGAGAAGATTGTGAA
CATCTTCAATGGGACCAGCTGCCCCAGCCTGGGAGGGAAGCCCAAGCTC
TTTTTCATCCAGGCCTGTGGTGGGGAGCAGAAAGACCATGGGTTTGAGG
TGGCCTCCACTTCCCCTGAAGACGAGTCCCCTGGCAGTAACCCCGAGCC
AGATGCCACCCCGTTCCAGGAAGGTTTGAGGACCTTCGACCAGCTGGCC
GCCATATCTAGTTTGCCCACACCCAGTGACATCTTTGTGTCCTACTCTA
CTTTCCCAGGTTTTGTTTCCTGGAGGGACCCCAAGAGTGGCTCCTGGTA
CGTTGAGACCCTGGACGACATCTTTGAGCAGTGGGCTCACTCTGAAGAC
CTGCAGTCCCTCCTGCTTAGGGTCGCTAATGCTGTTTCGGTGAAAGGGA
TTTATAAACAGATGCCTGGTTGCTTTAATTTCCTCCGGAAAAAACTTTT
CTTTAAAACATCA
SEQ ID NO: 385, ΔCasp9 (res. 135-416) D330A,
amino acid sequence
GFGDVGALESLRGNADLAYILSMEPCGHCLIINNVN
FCRESGLRTRTGSNIDCEKLRRRFSSLHFMVEVKGD
LTAKKMVLALLELARQDHGALDCCVVVILSHGCQAS
HLQFPGAVYGTDGCPVSVEKIVNIFNGTSCPSLGGK
PKLFFIQACGGEQKDHGFEVASTSPEDESPGSNPEP
DATPFQEGLRTFDQLAAISSLPTPSDIFVSYSTFPGF
VSWRDPKSGSWYVETLDDIFEQWAHSEDLQSLLLR
VANAVSVKGIYKQMPGCFNFLRKKLFFKTS
SEQ ID NO: 386, ΔCasp9 (res. 135-416) N405Q
nucleotide sequence
GGATTTGGTGATGTCGGTGCTCTTGAGAGTTTGAGGGGAAATGCAGATT
TGGCTTACATCCTGAGCATGGAGCCCTGTGGCCACTGCCTCATTATCAA
CAATGTGAACTTCTGCCGTGAGTCCGGGCTCCGCACCCGCACTGGCTCC
AACATCGACTGTGAGAAGTTGCGGCGTCGCTTCTCCTCGCTGCATTTCA
TGGTGGAGGTGAAGGGCGACCTGACTGCCAAGAAAATGGTGCTGGCTTT
GCTGGAGCTGGCGCgGCAGGACCACGGTGCTCTGGACTGCTGCGTGGTG
GTCATTCTCTCTCACGGCTGTCAGGCCAGCCACCTGCAGTTCCCAGGGG
CTGTCTACGGCACAGATGGATGCCCTGTGTCGGTCGAGAAGATTGTGAA
CATCTTCAATGGGACCAGCTGCCCCAGCCTGGGAGGGAAGCCCAAGCTC
TTTTTCATCCAGGCCTGTGGTGGGGAGCAGAAAGACCATGGGTTTGAGG
TGGCCTCCACTTCCCCTGAAGACGAGTCCCCTGGCAGTAACCCCGAGCC
AGATGCCACCCCGTTCCAGGAAGGTTTGAGGACCTTCGACCAGCTGGAC
GCCATATCTAGTTTGCCCACACCCAGTGACATCTTTGTGTCCTACTCTA
CTTTCCCAGGTTTTGTTTCCTGGAGGGACCCCAAGAGTGGCTCCTGGTA
CGTTGAGACCCTGGACGACATCTTTGAGCAGTGGGCTCACTCTGAAGAC
CTGCAGTCCCTCCTGCTTAGGGTCGCTAATGCTGTTTCGGTGAAAGGGA
TTTATAAACAGATGCCTGGTTGCTTTCAGTTCCTCCGGAAAAAACTTTT
CTTTAAAACATCA
SEQ ID NO: 387, ΔCasp9 (res. 135-416) N405Q amino
acid sequence
GFGDVGALESLRGNADLAYILSMEPCGHCLIINNVN
FCRESGLRTRTGSNIDCEKLRRRFSSLHFMVEVKGD
LTAKKMVLALLELARQDHGALDCCVVVILSHGCQAS
HLQFPGAVYGTDGCPVSVEKIVNIFNGTSCPSLGGK
PKLFFIQACGGEQKDHGFEVASTSPEDESPGSNPEP
DATPFQEGLRTFDQLDAISSLPTPSDIFVSYSTFPGF
VSWRDPKSGSWYVETLDDIFEQWAHSEDLQSLLLR
VANAVSVKGIYKQMPGCFQFLRKKLFFKTS
SEQ ID NO: 388, ΔCasp9 (res. 135-416) D330A N405Q
nucleotide sequence
GGATTTGGTGATGTCGGTGCTCTTGAGAGTTTGAGGGGAAATGCAGATT
TGGCTTACATCCTGAGCATGGAGCCCTGTGGCCACTGCCTCATTATCAA
CAATGTGAACTTCTGCCGTGAGTCCGGGCTCCGCACCCGCACTGGCTCC
AACATCGACTGTGAGAAGTTGCGGCGTCGCTTCTCCTCGCTGCATTTCA
TGGTGGAGGTGAAGGGCGACCTGACTGCCAAGAAAATGGTGCTGGCTTT
GCTGGAGCTGGCGCgGCAGGACCACGGTGCTCTGGACTGCTGCGTGGTG
GTCATTCTCTCTCACGGCTGTCAGGCCAGCCACCTGCAGTTCCCAGGGG
CTGTCTACGGCACAGATGGATGCCCTGTGTCGGTCGAGAAGATTGTGAA
CATCTTCAATGGGACCAGCTGCCCCAGCCTGGGAGGGAAGCCCAAGCTC
TTTTTCATCCAGGCCTGTGGTGGGGAGCAGAAAGACCATGGGTTTGAGG
TGGCCTCCACTTCCCCTGAAGACGAGTCCCCTGGCAGTAACCCCGAGCC
AGATGCCACCCCGTTCCAGGAAGGTTTGAGGACCTTCGACCAGCTGGCC
GCCATATCTAGTTTGCCCACACCCAGTGACATCTTTGTGTCCTACTCTA
CTTTCCCAGGTTTTGTTTCCTGGAGGGACCCCAAGAGTGGCTCCTGGTA
CGTTGAGACCCTGGACGACATCTTTGAGCAGTGGGCTCACTCTGAAGAC
CTGCAGTCCCTCCTGCTTAGGGTCGCTAATGCTGTTTCGGTGAAAGGGA
TTTATAAACAGATGCCTGGTTGCTTTCAGTTCCTCCGGAAAAAACTTTT
CTTTAAAACATCA
SEQ ID NO: 389, ΔCasp9 (res. 135-416) D330A N405Q
amino acid sequence
GFGDVGALESLRGNADLAYILSMEPCGHCLIINNVN
FCRESGLRTRTGSNIDCEKLRRRFSSLHFMVEVKGD
LTAKKMVLALLELARQDHGALDCCVVVILSHGCQAS
HLQFPGAVYGTDGCPVSVEKIVNIFNGTSCPSLGGK
PKLFFIQACGGEQKDHGFEVASTSPEDESPGSNPEP
DATPFQEGLRTFDQLAAISSLPTPSDIFVSYSTFPGF
VSWRDPKSGSWYVETLDDIFEQWAHSEDLQSLLLR
VANAVSVKGIYKQMPGCFQFLRKKLFFKTS
SEQ ID NO: 390, Caspase-9.co nucleotide sequence
GTGGACGGGTTTGGAGATGTGGGAGCCCTGGAATCCCTGCGGGGCAATG
CCGATCTGGCTTACATCCTGTCTATGGAGCCTTGCGGCCACTGTCTGAT
CATTAACAATGTGAACTTCTGCAGAGAGAGCGGGCTGCGGACCAGAACA
GGATCCAATATTGACTGTGAAAAGCTGCGGAGAAGGTTCTCTAGTCTGC
ACTTTATGGTCGAGGTGAAAGGCGATCTGACCGCTAAGAAAATGGTGCT
GGCCCTGCTGGAACTGGCTCGGCAGGACCATGGGGCACTGGATTGCTGC
GTGGTCGTGATCCTGAGTCACGGCTGCCAGGCTTCACATCTGCAGTTCC
CTGGGGCAGTCTATGGAACTGACGGCTGTCCAGTCAGCGTGGAGAAGAT
CGTGAACATCTTCAACGGCACCTCTTGCCCAAGTCTGGGCGGGAAGCCC
AAACTGTTCTTTATTCAGGCCTGTGGAGGCGAGCAGAAAGATCACGGCT
TCGAAGTGGCTAGCACCTCCCCCGAGGACGAATCACCTGGAAGCAACCC
TGAGCCAGATGCAACCCCCTTCCAGGAAGGCCTGAGGACATTTGACCAG
CTGGATGCCATCTCAAGCCTGCCCACACCTTCTGACATTTTCGTCTCTT
ACAGTACTTTCCCTGGATTTGTGAGCTGGCGCGATCCAAAGTCAGGCAG
CTGGTACGTGGAGACACTGGACGATATCTTTGAGCAGTGGGCCCATTCT
GAAGACCTGCAGAGTCTGCTGCTGCGAGTGGCCAATGCTGTCTCTGTGA
AGGGGATCTACAAACAGATGCCAGGATGCTTCCAGTTTCTGAGAAAGAA
ACTGTTCTTTAAGACCTCCGCATCTAGGGCC
SEQ ID NO: 391, Caspase-9.co amino acid sequence
VDGFGDVGALESLRGNADLAYILSMEPCGHCLIINNVNFCRESGLRTRT
GSNIDCEKLRRRFSSLHFMVEVKGDLTAKKMVLALLELARQDHGALDCC
VVVILSHGCQASHLQFPGAVYGTDGCPVSVEKIVNIFNGTSCPSLGGKP
KLFFIQACGGEQKDHGFEVASTSPEDESPGSNPEPDATPFQEGLRTFDQ
LDAISSLPTPSDIFVSYSTFPGFVSWRDPKSGSWYVETLDDIFEQWAHS
EDLQSLLLRVANAVSVKGIYKQMPGCFQFLRKKLFFKTSASRA
SEQ ID NO: 392: Caspase9 D330E nucleotide sequence
GTCGACGGATTTGGTGATGTCGGTGCTCTTGAGAGTTTGAGGGGAAATG
CAGATTTGGCTTACATCCTGAGCATGGAGCCCTGTGGCCACTGCCTCAT
TATCAACAATGTGAACTTCTGCCGTGAGTCCGGGCTCCGCACCCGCACT
GGCTCCAACATCGACTGTGAGAAGTTGCGGCGTCGCTTCTCCTCGCTGC
ATTTCATGGTGGAGGTGAAGGGCGACCTGACTGCCAAGAAAATGGTGCT
GGCTTTGCTGGAGCTGGCGCGGCAGGACCACGGTGCTCTGGACTGCTGC
GTGGTGGTCATTCTCTCTCACGGCTGTCAGGCCAGCCACCTGCAGTTCC
CAGGGGCTGTCTACGGCACAGATGGATGCCCTGTGTCGGTCGAGAAGAT
TGTGAACATCTTCAATGGGACCAGCTGCCCCAGCCTGGGAGGGAAGCCC
AAGCTCTTTTTCATCCAGGCCTGTGGTGGGGAGCAGAAAGACCATGGGT
TTGAGGTGGCCTCCACTTCCCCTGAAGACGAGTCCCCTGGCAGTAACCC
CGAGCCAGATGCCACCCCGTTCCAGGAAGGTTTGAGGACCTTCGACCAG
CTGGcCGCCATATCTAGTTTGCCCACACCCAGTGACATCTTTGTGTCCT
ACTCTACTTTCCCAGGTTTTGTTTCCTGGAGGGACCCCAAGAGTGGCTC
CTGGTACGTTGAGACCCTGGACGACATCTTTGAGCAGTGGGCTCACTCT
GAAGACCTGCAGTCCCTCCTGCTTAGGGTCGCTAATGCTGTTTCGGTGA
AAGGGATTTATAAACAGATGCCTGGTTGCTTTAATTTCCTCCGGAAAAA
ACTTTTCTTTAAAACATCAGCTAGCAGAGCC
SEQ ID NO: 188: Caspase9 D330E amino acid sequence
VDGFGDVGALESLRGNADLAYILSMEPCGHCLIINNVNFCRESGLRTRT
GSNIDCEKLRRRFSSLHFMVEVKGDLTAKKMVLALLELARQDHGALDCC
VVVILSHGCQASHLQFPGAVYGTDGCPVSVEKIVNIFNGTSCPSLGGKP
KLFFIQACGGEQKDHGFEVASTSPEDESPGSNPEPDATPFQEGLRTFDQ
LeAISSLPTPSDIFVSYSTFPGFVSWRDPKSGSWYVETLDDIFEQWAH
SEDLQSLLLRVANAVSVKGIYKQMPGCFNFLRKKLFFKTSASRA

Sequences for pBP0509
pBP0509-SFG-PSCAscFv.CH2CH3.CD28tm.zeta.MyD88/CD40 Sequence

Signal peptide
SEQ ID NO: 189
ATGGAGTTTGGACTTTCTTGGTTGTTTTTGGTGGCAATTCTGAAGGGTGT
CCAGTGTAGCAGG
Signal peptide
SEQ ID NO: 190
MEFGLSWLFLVAILKGVQCSR
bm2B3 variable light chain
SEQ ID NO: 191
GACATCCAGCTGACACAAAGTCCCAGTAGCCTGTCAGCCAGTGTCGGCGA
TAGGGTGACAATTACATGCTCCGCAAGTAGTAGCGTCAGATTCATACACT
GGTACCAGCAGAAGCCTGGGAAGGCCCCAAAGAGGCTTATCTACGATACC
AGTAAACTCGCCTCTGGAGTTCCTAGCCGGTTTTCTGGATCTGGCAGCGG
AACTAGCTACACCCTCACAATCTCCAGTCTGCAACCAGAGGACTTTGCAA
CCTACTACTGCCAGCAATGGAGCAGCTCCCCTTTCACCTTTGGGCAGGGT
ACTAAGGTGGAGATCAAG
bm2B3 variable light chain
SEQ ID NO: 192
DIQLTQSPSSLSASVGDRVTITCSASSSVRFIHVVYQQKPGKAPKRLIYD
TSKLASGVPSRFSGSGSGTSYTLTISSLQPEDFATYYCQQWSSSPFTFGQ
GTKVEIK
Flexible linker
SEQ ID NO: 193
GGCGGAGGAAGCGGAGGTGGGGGC
Flexible linker
SEQ ID NO: 194
GGGSGGGG
bm2B3 variable heavy chain
SEQ ID NO: 195
GAGGTGCAGCTTGTAGAGAGCGGGGGAGGCCTCGTACAGCCAGGGGGCTC
TCTGCGCCTGTCATGTGCAGCTTCAGGATTCAATATAAAGGACTATTACA
TTCACTGGGTACGGCAAGCTCCCGGTAAGGGCCTGGAATGGATCGGTTGG
ATCGACCCTGAAAACGGAGATACAGAATTTGTGCCCAAGTTCCAGGGAAA
GGCTACCATGTCTGCCGATACTTCTAAGAATACAGCATACCTTCAGATGA
ATTCTCTCCGCGCCGAGGACACAGCCGTGTATTATTGTAAAACGGGAGGG
TTCTGGGGTCAGGGTACCCTTGTGACTGTGTCTTCC
bm2B3 variable heavy chain
SEQ ID NO: 196
EVQLVESGGGLVQPGGSLRLSCAASGFNIKDYYIHWVRQAPGKGLEWIG
WIDPENGDTEFVPKFQGKATMSADTSKNTAYLQMNSLRAEDTAVYYCKTG
GFWGQGTLVTVSS
Linker
SEQ ID NO: 197
GGGGATCCCGCC
Linker
SEQ ID NO: 198
GDPA
IgG1 hinge region
SEQ ID NO: 199
GAGCCCAAATCTCCTGACAAAACTCACACATGCCCA
IgG1 hinge region
SEQ ID NO: 200
EPKSPDKTHTCP
IgG1 CH2 region
SEQ ID NO: 201
CCGTGCCCAGCACCTGAACTCCTGGGGGGACCGTCAGTCTTCCTCTTCCC
CCCAAAACCCAAAGACACCCTCATGATCTCCCGGACCCCTGAGGTCACAT
GCGTGGTGGTGGACGTGAGCCACGAAGACCCTGAGGTCAAGTTCAACTGG
TATGTGGACGGCGTGGAGGTGCATAATGCAAAGACAAAGCCGCGGGAGGA
GCAGTACAACAGCACGTACCGTGTGGTCAGCGTCCTCACCGTCCTGCACC
AGGACTGGCTGAATGGCAAGGAGTACAAGTGCAAGGTCTCCAACAAAGCC
CTCCCAGCCCCCATCGAGAAAACCATCTCCAAAGCCAAA
IgG1 CH2 region
SEQ ID NO: 202
PCPAPELLGGPSVFLFPPKPKDTLMISRTPEVTCVVVDVSHEDPEVKFNW
YVDGVEVHNAKTKPREEQYNSTYRVVSVLTVLHQDWLNGKEYKCKVSNKA
LPAPIEKTISKAK
IgG1 CH3 region
SEQ ID NO: 203
GGGCAGCCCCGAGAACCACAGGTGTACACCCTGCCCCCATCCCGGGATGA
GCTGACCAAGAACCAGGTCAGCCTGACCTGCCTGGTCAAAGGCTTCTATC
CCAGCGACATCGCCGTGGAGTGGGAGAGCAATGGGCAACCGGAGAACAAC
TACAAGACCACGCCTCCCGTGCTGGACTCCGACGGCTCCTTCTTCCTCTA
CAGCAAGCTCACCGTGGACAAGAGCAGGTGGCAGCAGGGGAACGTCTTCT
CATGCTCCGTGATGCATGAGGCTCTGCACAACCACTACACGCAGAAGAGC
CTCTCCCTGTCTCCGGGTAAA
IgG1 CH3 region
SEQ ID NO: 204
GQPREPQVYTLPPSRDELTKNQVSLTCLVKGFYPSDIAVEWESNGQPENN
YKTTPPVLDSDGSFFLYSKLTVDKSRWQQGNVFSCSVMHEALHNHYTQKS
LSLSPGK
Linker
SEQ ID NO: 205
AAAGATCCCAAA
Linker
SEQ ID NO: 206
KDPK
CD28 transmembrane region
SEQ ID NO: 207
TTTTGGGTGCTGGTGGTGGTTGGTGGAGTCCTGGCTTGCTATAGCTTGCT
AGTAACAGTGGCCTTTATTATT
CD28 transmembrane region
SEQ ID NO: 208
FWVLVVVGGVLACYSLLVTVAFII
Linker
SEQ ID NO: 209
gccggc
Linker
SEQ ID NO: 210
AG
CD3 zeta
SEQ ID NO: 211
AGAGTGAAGTTCAGCAGGAGCGCAGACGCCCCCGCGTACCAGCAGGGCCA
GAACCAGCTCTATAACGAGCTCAATCTAGGACGAAGAGAGGAGTACGATG
TTTTGGACAAGAGACGTGGCCGGGACCCTGAGATGGGGGGAAAGCCGAGA
AGGAAGAACCCTCAGGAAGGCCTGTACAATGAACTGCAGAAAGATAAGAT
GGCGGAGGCCTACAGTGAGATTGGGATGAAAGGCGAGCGCCGGAGGGGCA
AGGGGCACGATGGCCTTTACCAGGGTCTCAGTACAGCCACCAAGGACACC
TACGACGCCCTTCACATGCAGGCCCTGCCCCCTCGC
CD3 zeta
SEQ ID NO: 212
RVKFSRSADAPAYQQGQNQLYNELNLGRREEYDVLDKRRGRDPEMGGKPR
RKNPQEGLYNELQKDKMAEAYSEIGMKGERRRGKGHDGLYQGLSTATKDT
YDALHMQALPPR
MyD88
SEQ ID NO: 213
GCCGCTGGGGGCCCAGGCGCCGGATCAGCTGCTCCCGTATCTTCTACTTC
TTCTTTGCCGCTGGCTGCTCTGAACATGCGCGTGAGAAGACGCCTCTCCC
TGTTCCTTAACGTTCGCACACAAGTCGCTGCCGATTGGACCGCCCTTGCC
GAAGAAATGGACTTTGAATACCTGGAAATTAGACAACTTGAAACACAGGC
CGACCCCACTGGCAGACTCCTGGACGCATGGCAGGGAAGACCTGGTGCAA
GCGTTGGACGGCTCCTGGATCTCCTGACAAAACTGGGACGCGACGACGTA
CTGCTTGAACTCGGACCTAGCATTGAAGAAGACTGCCAAAAATATATCCT
GAAACAACAACAAGAAGAAGCCGAAAAACCTCTCCAAGTCGCAGCAGTGG
ACTCATCAGTACCCCGAACAGCTGAGCTTGCTGGGATTACTACACTCGAC
GACCCACTCGGACATATGCCTGAAAGATTCGACGCTTTCATTTGCTATTG
CCCCTCTGACATA
MyD88
SEQ ID NO: 214
AAGGPGAGSAAPVSSTSSLPLAALNMRVRRRLSLFLNVRTQVAADWTALA
EEMDFEYLEIRQLETQADPTGRLLDAWQGRPGASVGRLLDLLTKLGRDDV
LLELGPSIEEDCQKYILKQQQEEAEKPLQVAAVDSSVPRTAELAGITTLD
DPLGHMPERFDAFICYCPSDI
CD40
SEQ ID NO: 215
AAGAAAGTTGCAAAGAAACCCACAAATAAAGCCCCACACCCTAAACAGGA
ACCCCAAGAAATCAATTTCCCAGATGATCTCCCTGGATCTAATACTGCCG
CCCCGGTCCAAGAAACCCTGCATGGTTGCCAGCCTGTCACCCAAGAGGAC
GGAAAAGAATCACGGATTAGCGTACAAGAGAGACAATAG
CD40
SEQ ID NO: 216
KKVAKKPTNKAPHPKQEPQEINFPDDLPGSNTAAPVQETLHGCQPVTQED
GKESRISVQERQ*

Sequences for pBP0425
pBP0521-SFG-CD19scFv.CH2CH3.CD28tm.MyD88/CD40.zeta Sequence

Signal peptide
SEQ ID NO: 217
ATGGAGTTTGGACTTTCTTGGTTGTTTTTGGTGGCAATTCTGAAGGGTGT
CCAGTGTAGCAGG
Signal peptide
SEQ ID NO: 218
MEFGLSWLFLVAILKGVQCSR
FMC63 variable light chain
SEQ ID NO: 219
GACATCCAGATGACACAGACTACATCCTCCCTGTCTGCCTCTCTGGGAGA
CAGAGTCACCATCAGTTGCAGGGCAAGTCAGGACATTAGTAAATATTTAA
ATTGGTATCAGCAGAAACCAGATGGAACTGTTAAACTCCTGATCTACCAT
ACATCAAGATTACACTCAGGAGTCCCATCAAGGTTCAGTGGCAGTGGGTC
TGGAACAGATTATTCTCTCACCATTAGCAACCTGGAGCAAGAAGATATTG
CCACTTACTTTTGCCAACAGGGTAATACGCTTCCGTACACGTTCGGAGGG
GGGACTAAGTTGGAAATAACA
FMC63 variable light chain
SEQ ID NO: 220
DIQMTQTTSSLSASLGDRVTISCRASQDISKYLNWYQQKPDGTVKLLIYH
TSRLHSGVPSRFSGSGSGTDYSLTISNLEQEDIATYFCQQGNTLPYTFGG
GTKLEIT
Flexible linker
SEQ ID NO: 221
GGCGGAGGAAGCGGAGGTGGGGGC
Flexible linker
SEQ ID NO: 222
GGGSGGGG
FMC63 variable heavy chain
SEQ ID NO: 223
GAGGTGAAACTGCAGGAGTCAGGACCTGGCCTGGTGGCGCCCTCACAGAG
CCTGTCCGTCACATGCACTGTCTCAGGGGTCTCATTACCCGACTATGGTG
TAAGCTGGATTCGCCAGCCTCCACGAAAGGGTCTGGAGTGGCTGGGAGTA
ATATGGGGTAGTGAAACCACATACTATAATTCAGCTCTCAAATCCAGACT
GACCATCATCAAGGACAACTCCAAGAGCCAAGTTTTCTTAAAAATGAACA
GTCTGCAAACTGATGACACAGCCATTTACTACTGTGCCAAACATTATTAC
TACGGTGGTAGCTATGCTATGGACTACTGGGGTCAAGGAACCTCAGTCAC
CGTCTCCTCA
FMC63 variable heavy chain
SEQ ID NO: 224
EVKLQESGPGLVAPSQSLSVTCTVSGVSLPDYGVSWIRQPPRKGLEWLG
VIWGSETTYYNSALKSRLTIIKDNSKSQVFLKMNSLQTDDTAIYYCAKH
YYYGGSYAMDYWGQGTSVTVSS
Linker
SEQ ID NO: 225
GGGGATCCCGCC
Linker
SEQ ID NO: 226
GDPA
IgG1 hinge
SEQ ID NO: 227
GAGCCCAAATCTCCTGACAAAACTCACACATGCCCA
IgG1 hinge
SEQ ID NO: 228
EPKSPDKTHTCP
IgG1 CH2 region
SEQ ID NO: 229
CCGTGCCCAGCACCTGAACTCCTGGGGGGACCGTCAGTCTTCCTCTTCC
CCCCAAAACCCAAAGACACCCTCATGATCTCCCGGACCCCTGAGGTCAC
ATGCGTGGTGGTGGACGTGAGCCACGAAGACCCTGAGGTCAAGTTCAAC
TGGTATGTGGACGGCGTGGAGGTGCATAATGCAAAGACAAAGCCGCGGG
AGGAGCAGTACAACAGCACGTACCGTGTGGTCAGCGTCCTCACCGTCCT
GCACCAGGACTGGCTGAATGGCAAGGAGTACAAGTGCAAGGTCTCCAAC
AAAGCCCTCCCAGCCCCCATCGAGAAAACCATCTCCAAAGCCAAA
IgG1 CH2 region
SEQ ID NO: 230
PCPAPELLGGPSVFLFPPKPKDTLMISRTPEVTCVVVDVSHEDPEVKFN
WYVDGVEVHNAKTKPREEQYNSTYRVVSVLTVLHQDWLNGKEYKCKVSN
KALPAPIEKTISKAK
IgG1 CH3 region
SEQ ID NO: 231
GGGCAGCCCCGAGAACCACAGGTGTACACCCTGCCCCCATCCCGGGATG
AGCTGACCAAGAACCAGGTCAGCCTGACCTGCCTGGTCAAAGGCTTCTA
TCCCAGCGACATCGCCGTGGAGTGGGAGAGCAATGGGCAACCGGAGAAC
AACTACAAGACCACGCCTCCCGTGCTGGACTCCGACGGCTCCTTCTTCC
TCTACAGCAAGCTCACCGTGGACAAGAGCAGGTGGCAGCAGGGGAACGT
CTTCTCATGCTCCGTGATGCATGAGGCTCTGCACAACCACTACACGCAG
AAGAGCCTCTCCCTGTCTCCGGGTAAA
IgG1 CH3 region
SEQ ID NO: 232
GQPREPQVYTLPPSRDELTKNQVSLTCLVKGFYPSDIAVEWESNGQPEN
NYKTTPPVLDSDGSFFLYSKLTVDKSRWQQGNVFSCSVMHEALHNHYTQ
KSLSLSPGK
Linker
SEQ ID NO: 233
AAAGATCCCAAA
Linker
SEQ ID NO: 234
KDPK
CD28 transmembrane region
SEQ ID NO: 235
TTTTGGGTGCTGGTGGTGGTTGGTGGAGTCCTGGCTTGCTATAGCTTGC
TAGTAACAGTGGCCTTTATTATT
CD28 transmembrane region
SEQ ID NO: 236
FWVLVVVGGVLACYSLLVTVAFII
Linker
SEQ ID NO: 237
Ctcgag
Linker
SEQ ID NO: 238
LE
MyD88
SEQ ID NO: 239
ATGGCCGCTGGGGGCCCAGGCGCCGGATCAGCTGCTCCCGTATCTTCTA
CTTCTTCTTTGCCGCTGGCTGCTCTGAACATGCGCGTGAGAAGACGCCT
CTCCCTGTTCCTTAACGTTCGCACACAAGTCGCTGCCGATTGGACCGCC
CTTGCCGAAGAAATGGACTTTGAATACCTGGAAATTAGACAACTTGAAA
CACAGGCCGACCCCACTGGCAGACTCCTGGACGCATGGCAGGGAAGACC
TGGTGCAAGCGTTGGACGGCTCCTGGATCTCCTGACAAAACTGGGACGC
GACGACGTACTGCTTGAACTCGGACCTAGCATTGAAGAAGACTGCCAAA
AATATATCCTGAAACAACAACAAGAAGAAGCCGAAAAACCTCTCCAAGT
CGCAGCAGTGGACTCATCAGTACCCCGAACAGCTGAGCTTGCTGGGATT
ACTACACTCGACGACCCACTCGGACATATGCCTGAAAGATTCGACGCTT
TCATTTGCTATTGCCCCTCTGACATA
MyD88
SEQ ID NO: 240
MAAGGPGAGSAAPVSSTSSLPLAALNMRVRRRLSLFLNVRTQVAADWTA
LAEEMDFEYLEIRQLETQADPTGRLLDAWQGRPGASVGRLLDLLTKLGR
DDVLLELGPSIEEDCQKYILKQQQEEAEKPLQVAAVDSSVPRTAELAGI
TTLDDPLGHMPERFDAFICYCPSDI
CD40
SEQ ID NO: 241
AAGAAAGTTGCAAAGAAACCCACAAATAAAGCCCCACACCCTAAACAGG
AACCCCAAGAAATCAATTTCCCAGATGATCTCCCTGGATCTAATACTGC
CGCCCCGGTCCAAGAAACCCTGCATGGTTGCCAGCCTGTCACCCAAGAG
GACGGAAAAGAATCACGGATTAGCGTACAAGAGAGACAA
CD40
SEQ ID NO: 242
KKVAKKPTNKAPHPKQEPQEINFPDDLPGSNTAAPVQETLHGCQPVTQE
DGKESRISVQERQ
Linker
SEQ ID NO: 243
gcggccgcagTCGAG
Linker
SEQ ID NO: 244
AAAVE
CD3 zeta chain
SEQ ID NO: 245
AGAGTGAAGTTCAGCAGGAGCGCAGACGCCCCCGCGTACCAGCAGGGCC
AGAACCAGCTCTATAACGAGCTCAATCTAGGACGAAGAGAGGAGTACGA
TGTTTTGGACAAGAGACGTGGCCGGGACCCTGAGATGGGGGGAAAGCCG
AGAAGGAAGAACCCTCAGGAAGGCCTGTACAATGAACTGCAGAAAGATA
AGATGGCGGAGGCCTACAGTGAGATTGGGATGAAAGGCGAGCGCCGGAG
GGGCAAGGGGCACGATGGCCTTTACCAGGGTCTCAGTACAGCCACCAAG
GACACCTACGACGCCCTTCACATGCAGGCCCTGCCCCCTCGCTAA
CD3 zeta chain
SEQ ID NO: 246
RVKFSRSADAPAYQQGQNQLYNELNLGRREEYDVLDKRRGRDPEMGGKP
RRKNPQEGLYNELQKDKMAEAYSEIGMKGERRRGKGHDGLYQGLSTATK
DTYDALHMQALPPR*

Sequences for SFG-Myr. MC-2A-CD19. scfv. CD34e. CD8stm.zeta
SFG-Myr.MC.2A.CD19scFv.CD34e.CD8stm.zeta Sequence

Myristolation
SEQ ID NO: 247
atggggagtagcaagagcaagcctaaggaccccagccagcgc
Myristolation
SEQ ID NO: 248
MGSSKSKPKDPSQR
Linker
SEQ ID NO: 249
ctcgac
Linker
SEQ ID NO: 250
LD
MyD88
SEQ ID NO: 251
atggctgcaggaggtcccggcgcggggtctgcggccccggtctcctccac
atcctcccttcccctggctgctctcaacatgcgagtgcggcgccgcctgt
ctctgttcttgaacgtgcggacacaggtggcggccgactggaccgcgctg
gcggaggagatggactttgagtacttggagatccggcaactggagacaca
agcggaccccactggcaggctgctggacgcctggcagggacgccctggcg
cctctgtaggccgactgctcgatctgcttaccaagctgggccgcgacgac
gtgctgctggagctgggacccagcattgaggaggattgccaaaagtatat
cttgaagcagcagcaggaggaggctgagaagcctttacaggtggccgctg
tagacagcagtgtcccacggacagcagagctggcgggcatcaccacactt
gatgaccccctggggcatatgcctgagcgtttcgatgccttcatctgcta
ttgccccagcgacatc
MyD88
SEQ ID NO:252
MAAGGPGAGSAAPVSSTSSLPLAALNMRVRRRLSLFLNVRTQVAADWTAL
AEEMDFEYLEIRQLETQADPTGRLLDAWQGRPGASVGRLLDLLTKLGRDD
VLLELGPSIEEDCQKYILKQQQEEAEKPLQVAAVDSSVPRTAELAGITTL
DDPLGHMPERFDAFICYCPSDI
Linker
SEQ ID NO: 253
gtcgag
Linker
SEQ ID NO: 254
VE
CD40
SEQ ID NO: 255
aaaaaggtggccaagaagccaaccaataaggccccccaccccaagcagga
gccccaggagatcaattttcccgacgatcttcctggctccaacactgctg
ctccagtgcaggagactttacatggatgccaaccggtcacccaggaggat
ggcaaagagagtcgcatctcagtgcaggagagacag
CD40
SEQ ID NO: 256
KKVAKKPTNKAPHPKQEPQEINFPDDLPGSNTAAPVQETLHGCQPVTQED
GKESRISVQERQ
Linker
SEQ ID NO: 257
CCGCGG
Linker
SEQ ID NO: 258
PR
T2A sequence
SEQ ID NO: 259
GAAGGCCGAGGGAGCCTGCTGACATGTGGCGATGTGGAGGAAAACCCAGG
ACCA
T2A sequence
SEQ ID NO: 260
EGRGSLLTCGDVEENPGP
Signal peptide
SEQ ID NO: 261
ATGGAGTTTGGACTTTCTTGGTTGTTTTTGGTGGCAATTCTGAAGGGTG
TCCAGTGTAGCAGG
Signal peptide
SEQ ID NO: 262
MEFGLSWLFLVAILKGVQCSR
FMC63 variable light chain
SEQ ID NO: 263
GACATCCAGATGACACAGACTACATCCTCCCTGTCTGCCTCTCTGGGAGA
CAGAGTCACCATCAGTTGCAGGGCAAGTCAGGACATTAGTAAATATTTAA
ATTGGTATCAGCAGAAACCAGATGGAACTGTTAAACTCCTGATCTACCAT
ACATCAAGATTACACTCAGGAGTCCCATCAAGGTTCAGTGGCAGTGGGTC
TGGAACAGATTATTCTCTCACCATTAGCAACCTGGAGCAAGAAGATATTG
CCACTTACTTTTGCCAACAGGGTAATACGCTTCCGTACACGTTCGGAGGG
GGGACTAAGTTGGAAA
TAACA
FMC63 variable light chain
SEQ ID NO: 264
DIQMTQTTSSLSASLGDRVTISCRASQDISKYLNWYQQKPDGTVKLLIYH
TSRLHSGVPSRFSGSGSGTDYSLTISNLEQEDIATYFCQQGNTLPYTFGG
GTKLEIT
Flexible linker
SEQ ID NO: 265
GGCGGAGGAAGCGGAGGTGGGGGC
Flexible linker
SEQ ID NO: 266
GGGSGGGG
FMC63 variable heavy chain
SEQ ID NO: 267
GAGGTGAAACTGCAGGAGTCAGGACCTGGCCTGGTGGCGCCCTCACAGAG
CCTGTCCGTCACATGCACTGTCTCAGGGGTCTCATTACCCGACTATGGTG
TAAGCTGGATTCGCCAGCCTCCACGAAAGGGTCTGGAGTGGCTGGGAGTA
ATATGGGGTAGTGAAACCACATACTATAATTCAGCTCTCAAATCCAGACT
GACCATCATCAAGGACAACTCCAAGAGCCAAGTTTTCTTAAAAATGAAC
AGTCTGCAAACTGATGACACAGCCATTTACTACTGTGCCAAACATTATTA
CTACGGTGGTAGCTATGCTATGGACTACTGGGGTCAAGGAACCTCAGTCA
CCGTCTCCTCA
FMC63 variable heavy chain
SEQ ID NO: 268
EVKLQESGPGLVAPSQSLSVTCTVSGVSLPDYGVSWIRQPPRKGLEWLGV
IWGSETTYYNSALKSRLTIIKDNSKSQVFLKMNSLQTDDTAIYYCAKHYY
YGGSYAMDYWGQGTSVTVSS
Linker
SEQ ID NO: 269
GGATCC
Linker
SEQ ID NO: 270
GS
CD34 minimal epitope
SEQ ID NO: 271
GAACTTCCTACTCAGGGGACTTTCTCAAACGTTAGCACAAACGTAAGT
CD34 minimal epitope
SEQ ID NO: 272
ELPTQGTFSNVSTNVS
CD8 alpha stalk domain
SEQ ID NO: 273
CCCGCCCCAAGACCCCCCACACCTGCGCCGACCATTGCTTCTCAACCCCT
GAGTTTGAGACCCGAGGCCTGCCGGCCAGCTGCCGGCGGGGCCGTGCATA
CAAGAGGACTCGATTTCGCTTGC
GAC
CD8 alpha stalk domain
SEQ ID NO: 274
PAPRPPTPAPTIASQPLSLRPEACRPAAGGAVHTRGLDFACD
CD8 alpha transmembrane domain
SEQ ID NO: 275
ATCTATATCTGGGCACCTCTCGCTGGCACCTGTGGAGTCCTTCTGCTCA
GCCTGGTTATTACTCTGTACTGTAATCACCGGAATCGCCGCCGCGTTTG
TAAGTGTCCCAGG
CD8 alpha transmembrane domain
SEQ ID NO: 276
IYIWAPLAGTCGVLLLSLVITLYCNHRNRRRVCKCPR
Linker
SEQ ID NO: 277
GTCGAC
Linker
SEQ ID NO: 278
VD
CD3 zeta
SEQ ID NO: 279
AGAGTGAAGTTCAGCAGGAGCGCAGACGCCCCCGCGTACCAGCAGGGCCA
GAACCAGCTCTATAACGAGCTCAATCTAGGACGAAGAGAGGAGTACGATG
TTTTGGACAAGAGACGTGGCCGGGACCCTGAGATGGGGGGAAAGCCGAGA
AGGAAGAACCCTCAGGAAGGCCTGTACAATGAACTGCAGAAAGATAAGAT
GGCGGAGGCCTACAGTGAGATTGGGATGAAAGGCGAGCGCCGGAGGGGCA
AGGGGCACGATGGCCTTTACCAGGGTCTCAGTACAGCCACCAAGGACACC
TACGACGCCCTTCACATGCAGGCCCTGCCCCCTCGC
CD3 zeta
SEQ ID NO: 280
RVKFSRSADAPAYQQGQNQLYNELNLGRREEYDVLDKRRGRDPEMGGKPR
RKNPQEGLYNELQKDKMAEAYSEIGMKGERRRGKGHDGLYQGLSTATKDT
YDALHMQALPPR
(MyD88 nucleotide sequence)
SEQ ID NO: 281
atggctgcaggaggtcccggcgcggggtctgcggccccggtctcctccac
atcctcccttcccctggctgctctcaacatgcgagtgcggcgccgcctgt
ctctgttcttgaacgtgcggacacaggtggcggccgactggaccgcgctg
gcggaggagatggactttgagtacttggagatccggcaactggagacaca
agcggaccccactggcaggctgctggacgcctggcagggacgccctggcg
cctctgtaggccgactgctcgagctgcttaccaagctgggccgcgacgac
gtgctgctggagctgggacccagcattgaggaggattgccaaaagtatat
cttgaagcagcagcaggaggaggctgagaagcctttacaggtggccgctg
tagacagcagtgtcccacggacagcagagctggcgggcatcaccacactt
gatgaccccctggggcatatgcctgagcgtttcgatgccttcatctgcta
ttgccccagcgacatccagtttgtgcaggagatgatccggcaactggaac
agacaaactatcgactgaagttgtgtgtgtctgaccgcgatgtcctgcct
ggcacctgtgtctggtctattgctagtgagctcatcgaaaagaggtgccg
ccggatggtggtggttgtctctgatgattacctgcagagcaaggaatgtg
acttccagaccaaatttgcactcagcctctctccaggtgcccatcagaag
cgactgatccccatcaagtacaaggcaatgaagaaagagttccccagcat
cctgaggttcatcactgtctgcgactacaccaacccctgcaccaaatctt
ggttctggactcgccttgccaaggccttgtccctgccc
(MyD88 amino acid sequence)
SEQ ID NO: 282
MAAGGPGAGSAAPVSSTSSLPLAALNMRVRRRLSLFLNVRTQVAAD
WTALAEEMDFEYLEIRQLETQADPTGRLLDAWQGRPGASVGRLLEL
LTKLGRDDVLLELGPSIEEDCQKYILKQQQEEAEKPLQVAAVDSSVP
RTAELAGITTLDDPLGHMPERFDAFICYCPSDIQFVQEMIRQLEQTN
YRLKLCVSDRDVLPGTCVWSIASELIEKRCRRMVVVVSDDYLQSKE
CDFQTKFALSLSPGAHQKRLIPIKYKAMKKEFPSILRFITVCDYTNPC
TKSWFWTRLAKALSLP

### Example 17

### Development of Improved Therapeutic Cell Dimmer Switch

[0675] Therapy using autologous T cells expressing chimeric antigen receptors (CARs) directed toward tumor-associated antigens (TAAs) has had a transformational effect on the treatment of certain types of leukemias (“liquid tumors”) and lymphomas with objective response (OR) rates approaching 90%. Despite their great clinical promise and the predictable accompanying enthusiasm, this success is tempered by the observed high level of on-target, off-tumor adverse events, typical of a cytokine release syndrome (CRS). To maintain the benefit of these revolutionary treatments while minimizing the risk, a chimeric caspase polypeptide-based suicide gene system has been developed, which is based on synthetic ligand-mediated dimerization of a modified Caspase-9 protein, fused to a ligand binding domain, called FKBP12v36. In the presence of the FKBP12v36-binding to the small molecule dimerizer, rimiducid (AP1903), Caspase-9 is activated, leading to rapid apoptosis of target cells. Addition of reduced levels of rimiducid can lead to a tempered rate of killing, allowing the amount of T cell elimination to be regulated from almost nothing to almost full elimination of chimeric caspase-modified T cells. To maximize the utility of this “dimmer” switch, the slope of the dose-response curve should be as gradual as possible; otherwise, administration of the correct dose is challenging. With the current, first generation, clinical iCaspase-9 construct, a dose response curve covering about 1.5 to 2 logs has been observed.

[0676] To improve on the therapeutic cell dimmer function, a second level of control may be added to Caspase-9 aggregation, separating rapamycin-driven low levels of aggregation from rimiducid-driven high levels of dimerization. In the first level of control, chimeric caspase polypeptides are recruited by rapamycin/sirolimus (or non-immunosuppressant analog) to a chimeric antigen receptor (CAR), which is modified to contain one or more copies of the 89-amino acid FKBP12-Rapamycin-Binding (FRB) domain (encoded within mTOR) on its carboxy terminus (FIG. 3, left panel). Relative to rimiducid-driven homodimerization of iCaspase-9, it is predicted that the level of Caspase-9 oligomerization would be reduced, both due to the relative affinities of rapamycin-bound FKBP12v36 to FRB (K_{d}˜4 nM) vs rimiducid-bound FKBP12v36 (˜0.1 nM) and due to the “staggered” geometry of the crosslinked proteins. An additional level of “fine-tuning” can be provided at the CAR docking site by changing the number of FRB domains fused to each CAR. Meanwhile, target-dependent specificity will be provided by normal target-driven CAR clustering, which should, in turn, be translated to chimeric caspase polypeptide clustering in the presence of rapamycin. When a maximum level of cell elimination is required, rimiducid can also be administered under the current protocol (i.e., currently 0.4 mg/kg in a 2-hour infusion (FIG. 3, right panel).

### Methods:

[0677] Vectors for rapalog-regulated chimeric caspase polypeptide: The Schreiber lab initially identified the minimal FKBP12-rapamycin binding (FRB) domain from mTOR/FRAP (residues 2025-2114), determining it to have a rapamycin dissociation constant (Kd) about 4 nM (Chen J et al (95) PNAS 92, 4947-51). Subsequent studies identified orthogonal mutants of FRB_{I} such as FRBI (L2098) that bind with relatively high affinity to non-immunosuppressant “bumped” rapamycin analogs (“rapalogs”) (Liberles S D (97) PNAS 94, 7825-30; Bayle J H (06) Chem & Biol 13, 99-107). In order to develop modified MC-CARs that can recruit CaspaCIDe, the carboxy terminal CD3 zeta domain (from pBP0526) and pBP0545, FIG. 7) are fused to 1 or 2 tandem FRB_{L} domains using a commercially synthesized SalI-MluI fragment that contains MyD88, CD40, and CD3ζ domains to produce vectors pBP0612 and pBP0611, respectively (FIGS. 4 and 5) and Tables 7 and 8. The approach should also be applicable to any CAR construct, including standard, “non-MyD88/CD40” constructs, such as those that include CD28, OX40, and/or 4-1 BB, and CD3zeta.

### Results:

[0678] As a proof of principal, two tandem FRB_{I} domains were fused to either a 1^{st} generation Her2-CAR or to a 1^{st} generation CD19-CAR co-expressing inducible Caspase-9. 293 cells were transiently transfected with a constitutive reporter plasmid, SRα-SEAP, along with normalized levels of expression plasmids encoding Her2-CAR-FRB_{I}2, iCaspase-9, Her2-CAR-FRB_{I}2+iCasp9, iC9-CAR(19).FRB_{I}2 (coexpressing both CD19-CAR-FRB_{I}2 and iCaspase9), or control vector. After 24 hours, cells were washed and distributed into duplicate wells with half-log dilutions of rapamycin or rimiducid. After overnight incubation with drugs, SEAP activity was determined. Interestingly, rapamycin addition led to a broad decrement of SEAP activity up to about a 50% decrease (FIG. 6). This dose-dependent decrease required the presence of both the FRB-tagged CAR and the FKBP-tagged Caspase-9. In contrast, AP1903 decreased SEAP activity to about 20% normal levels at much lower levels of drug, comparable to previous experience. It is likely possible to reduce cell viability with rapamycin and switch to rimiducid for more efficient killing in vivo if necessary. Moreover, on- or off-target-mediated CAR clustering should increase the sensitivity of killing primarily at the site of scFv engagement.

### Additional Permutations of the Hetero-Switch:

[0679] Although inducible Caspase-9 has been found to be the fastest and most CID-sensitive suicide gene tested among a large cohort of inducible signaling molecules, many other proteins or protein domains that lead to apoptosis (or related necroptosis, triggering inflammation and necrosis as the means of cell death) could be adapted to homo- or heterodimer-based killing using this approach.

[0680] A partial list of proteins that could be activated by rapamycin (or rapalog)-mediated membrane recruitment includes:

[0681] Other Caspases (i.e., Caspases 1 to 14, which have been identified in mammals)

[0682] Other Caspase-associated adapter molecules, such as FADD (DED), APAF1 (CARD), CRADD/RAIDD (CARD), and ASC (CARD) that function as natural caspase dimerizers (dimerization domains in parentheses).

[0683] Pro-apoptotic Bcl-2 Family members, such as Bax and Bak, which can cause mitochondrial depolarization (or mislocalization of anti-apoptotic family members, like Bcl-xL or Bcl-2).

[0684] RIPK3 or the RIPK1-RHIM domain that can trigger a related form of pro-inflammatory cell death, called necroptosis, due to MLKL-mediated membrane lysis.

[0685] Due to its target-dependent level of aggregation, CAR receptors should provide ideal docking sites for rapamycin-mediated recruitment of pro-apoptotic molecules. Nevertheless, many examples exist of multivalent docking site containing FRB domains that could potentially provide rapalog-mediated cell death in the presence of co-expressed chimeric inducible caspase-like molecules.

TABLE 7
iCasp9-2A-ΔCD19-Q-CD28stm-MCz-FRBI2

| | | SEQ ID | | SEQ ID |
|---|---|---|---|---|
| Fragment | Nucleotide | NO: | Polypeptide | NO: |
| FKBP | ATGGGAGTGCAGGTGGAGACTATTAGCCC | 393 | MGVQVETISPGDGRTFPKRGQT | 394 |
| 12v36 | CGGAGATGGCAGAACATTCCCCAAAAGAG | | CVVHYTGMLEDGKKVDSSRDRN | |
| | GACAGACTTGCGTCGTGCATTATACTGGAA | | KPFKFMLGKQEVIRGWEEGVAQ | |
| | TGCTGGAAGACGGCAAGAAGGTGGACAGC | | MSVGQRAKLTISPDYAYGATGHP | |
| | AGCCGGGACCGAAACAAGCCCTTCAAGTTC | | GIIPPHATLVFDVELLKLE | |
| | ATGCTGGGGAAGCAGGAAGTGATCCGGGG | | | |
| | CTGGGAGGAAGGAGTCGCACAGATGTCAG | | | |
| | TGGGACAGAGGGCCAAACTGACTATTAGCC | | | |
| | CAGACTACGCTTATGGAGCAACCGGCCAC | | | |
| | CCCGGGATCATTCCCCCTCATGCTACACTG | | | |
| | GTCTTCGATGTGGAGCTGCTGAAGCTGGAA | | | |
| Linker | AGCGGAGGAGGATCCGGA | 395 | SGGGSG | 396 |
| Δ | GTGGACGGGTTTGGAGATGTGGGAGCCCT | 397 | SEQ ID NO: 300 | 300 |
| Caspase-9 | GGAATCCCTGCGGGGCAATGCCGATCTGG | | VDGFGDVGALESLRGNADLAYIL | |
| | CTTACATCCTGTCTATGGAGCCTTGCGGCC | | SMEPCGHCLIINNVNFCRESGLR | |
| | ACTGTCTGATCATTAACAATGTGAACTTCTG | | TRTGSNIDCEKLRRRFSSLHFMV | |
| | CAGAGAGAGCGGGCTGCGGACCAGAACAG | | EVKGDLTAKKMVLALLELARQDH | |
| | GATCCAATATTGACTGTGAAAAGCTGCGGA | | GALDCCVVVILSHGCQASHLQFP | |
| | GAAGGTTCTCTAGTCTGCACTTTATGGTCG | | GAVYGTDGCPVSVEKIVNIFNGT | |
| | AGGTGAAAGGCGATCTGACCGCTAAGAAAA | | SCPSLGGKPKLFFIQACGGEQKD | |
| | TGGTGCTGGCCCTGCTGGAACTGGCTCGG | | HGFEVASTSPEDESPGSNPEPD | |
| | CAGGACCATGGGGCACTGGATTGCTGCGT | | ATPFQEGLRTFDQLDAISSLPTPS | |
| | GGTCGTGATCCTGAGTCACGGCTGCCAGG | | DIFVSYSTFPGFVSWRDPKSGS | |
| | CTTCACATCTGCAGTTCCCTGGGGCAGTCT | | WYVETLDDIFEQWAHSEDLQSLL | |
| | ATGGAACTGACGGCTGTCCAGTCAGCGTG | | LRVANAVSVKGIYKQMPGCFNFL | |
| | GAGAAGATCGTGAACATCTTCAACGGCACC | | RKKLFFKTSASRA | |
| | TCTTGCCCAAGTCTGGGCGGGAAGCCCAA | | | |
| | ACTGTTCTTTATTCAGGCCTGTGGAGGCGA | | | |
| | GCAGAAAGATCACGGCTTCGAAGTGGCTA | | | |
| | GCACCTCCCCCGAGGACGAATCACCTGGA | | | |
| | AGCAACCCTGAGCCAGATGCAACCCCCTTC | | | |
| | CAGGAAGGCCTGAGGACATTTGACCAGCT | | | |
| | GGATGCCATCTCAAGCCTGCCCACACCTTC | | | |
| | TGACATTTTCGTCTCTTACAGTACTTTCCCT | | | |
| | GGATTTGTGAGCTGGCGCGATCCAAAGTCA | | | |
| | GGCAGCTGGTACGTGGAGACACTGGACGA | | | |
| | TATCTTTGAGCAGTGGGCCCATTCTGAAGA | | | |
| | CCTGCAGAGTCTGCTGCTGCGAGTGGCCA | | | |
| | ATGCTGTCTCTGTGAAGGGGATCTACAAAC | | | |
| | AGATGCCAGGATGCTTCAACTTTCTGAGAA | | | |
| | AGAAACTGTTCTTTAAGACCTCCGCATCTA | | | |
| | GGGCC | | | |
| Linker | CCGCGG | 398 | PR | 399 |
| T2A | GAAGGCCGAGGGAGCCTGCTGACATGTGG | 400 | EGRGSLLTCGDVEENPGP | 401 |
| | CGATGTGGAGGAAAACCCAGGACCA | | | |
| Linker | Ccatgg | 402 | PW | 403 |
| (NcoI) | | | | |
| Sig | ATGGAGTTTGGACTTTCTTGGTTGTTTTTGG | 404 | MEFGLSWLFLVAILKGVQCSR | 405 |
| Peptide | TGGCAATTCTGAAGGGTGTCCAGTGTAGCA | | | |
| | GG | | | |
| FMC63- | GACATCCAGATGACACAGACTACATCCTCC | 406 | DIQMTQTTSSLSASLGDRVTISCR | 407 |
| VL | CTGTCTGCCTCTCTGGGAGACAGAGTCACC | | ASQDISKYLNWYQQKPDGTVKLL | |
| | ATCAGTTGCAGGGCAAGTCAGGACATTAGT | | IYHTSRLHSGVPSRFSGSGSGTD | |
| | AAATATTTAAATTGGTATCAGCAGAAACCAG | | YSLTISNLEQEDIATYFCQQGNTL | |
| | ATGGAACTGTTAAACTCCTGATCTACCATAC | | PYTFGGGTKLEIT | |
| | ATCAAGATTACACTCAGGAGTCCCATCAAG | | | |
| | GTTCAGTGGCAGTGGGTCTGGAACAGATTA | | | |
| | TTCTCTCACCATTAGCAACCTGGAGCAAGA | | | |
| | AGATATTGCCACTTACTTTTGCCAACAGGG | | | |
| | TAATACGCTTCCGTACACGTTCGGAGGGGG | | | |
| | GACTAAGTTGGAAATAACA | | | |
| Flex- | GGCGGAGGAAGCGGAGGTGGGGGC | 408 | GGGSGGGG | 409 |
| linker | | | | |
| FMC63- | GAGGTGAAACTGCAGGAGTCAGGACCTGG | 410 | EVKLQESGPGLVAPSQSLSVTCT | 411 |
| VH | CCTGGTGGCGCCCTCACAGAGCCTGTCCG | | VSGVSLPDYGVSWIRQPPRKGLE | |
| | TCACATGCACTGTCTCAGGGGTCTCATTAC | | WLGVIWGSETTYYNSALKSRLTII | |
| | CCGACTATGGTGTAAGCTGGATTCGCCAGC | | KDNSKSQVFLKMNSLQTDDTAIY | |
| | CTCCACGAAAGGGTCTGGAGTGGCTGGGA | | YCAKHYYYGGSYAMDYWGQGT | |
| | GTAATATGGGGTAGTGAAACCACATACTAT | | SVTVSS | |
| | AATTCAGCTCTCAAATCCAGACTGACCATC | | | |
| | ATCAAGGACAACTCCAAGAGCCAAGTTTTC | | | |
| | TTAAAAATGAACAGTCTGCAAACTGATGACA | | | |
| | CAGCCATTTACTACTGTGCCAAACATTATTA | | | |
| | CTACGGTGGTAGCTATGCTATGGACTACTG | | | |
| | GGGTCAAGGAACCTCAGTCACCGTCTCCTC | | | |
| | A | | | |
| Linker | GGATCC | 412 | GS | 413 |
| (BamHI) | | | | |
| CD34 | GAACTTCCTACTCAGGGGACTTTCTCAAAC | 414 | ELPTQGTFSNVSTNVS | 415 |
| epitope | GTTAGCACAAACGTAAGT | | | |
| CD8a | CCCGCCCCAAGACCCCCCACACCTGCGCC | 416 | PAPRPPTPAPTIASQPLSLRPEAC | 417 |
| stalk | GACCATTGCTTCTCAACCCCTGAGTTTGAG | | RPAAGGAVHTRGLDFACD | |
| | ACCCGAGGCCTGCCGGCCAGCTGCCGGC | | | |
| | GGGGCCGTGCATACAAGAGGACTCGATTT | | | |
| | CGCTTGCGAC | | | |
| CD8tm | ATCTATATCTGGGCACCTCTCGCTGGCACC | 418 | IYIWAPLAGTCGVLLLSLVITLYCN | 419 |
| + | TGTGGAGTCCTTCTGCTCAGCCTGGTTATT | | HRNRRRVCKCPR | |
| stop tf | ACTCTGTACTGTAATCACCGGAATCGCCGC | | | |
| | CGCGTTTGTAAGTGTCCCAGG | | | |
| Linker | gtcgac | 420 | VD | 421 |
| (SalI) | | | | |
| MyD88 | ATGGCCGCTGGGGGCCCAGGCGCCGGAT | 422 | MAAGGPGAGSAAPVSSTSSLPL | 423 |
| | CAGCTGCTCCCGTATCTTCTACTTCTTCTTT | | AALNMRVRRRLSLFLNVRTQVAA | |
| | GCCGCTGGCTGCTCTGAACATGCGCGTGA | | DWTALAEEMDFEYLEIRQLETQA | |
| | GAAGACGCCTCTCCCTGTTCCTTAACGTTC | | DPTGRLLDAWQGRPGASVGRLL | |
| | GCACACAAGTCGCTGCCGATTGGACCGCC | | DLLTKLGRDDVLLELGPSIEEDCQ | |
| | CTTGCCGAAGAAATGGACTTTGAATACCTG | | KYILKQQQEEAEKPLQVAAVDSS | |
| | GAAATTAGACAACTTGAAACACAGGCCGAC | | VPRTAELAGITTLDDPLGHMPER | |
| | CCCACTGGCAGACTCCTGGACGCATGGCA | | FDAFICYCPSDI | |
| | GGGAAGACCTGGTGCAAGCGTTGGACGGC | | | |
| | TCCTGGATCTCCTGACAAAACTGGGACGCG | | | |
| | ACGACGTACTGCTTGAACTCGGACCTAGCA | | | |
| | TTGAAGAAGACTGCCAAAAATATATCCTGAA | | | |
| | ACAACAACAAGAAGAAGCCGAAAAACCTCT | | | |
| | CCAAGTCGCAGCAGTGGACTCATCAGTACC | | | |
| | CCGAACAGCTGAGCTTGCTGGGATTACTAC | | | |
| | ACTCGACGACCCACTCGGACATATGCCTGA | | | |
| | AAGATTCGACGCTTTCATTTGCTATTGCCCC | | | |
| | TCTGACATA | | | |
| dCD40 | AAGAAAGTTGCAAAGAAACCCACAAATAAA | 424 | KKVAKKPTNKAPHPKQEPQEINF | 425 |
| | GCCCCACACCCTAAACAGGAACCCCAAGAA | | PDDLPGSNTAAPVQETLHGCQP | |
| | ATCAATTTCCCAGATGATCTCCCTGGATCTA | | VTQEDGKESRISVQERQ | |
| | ATACTGCCGCCCCGGTCCAAGAAACCCTG | | | |
| | CATGGTTGCCAGCCTGTCACCCAAGAGGA | | | |
| | CGGAAAAGAATCACGGATTAGCGTACAAGA | | | |
| | GAGACAA | | | |
| CD3z | AGAGTGAAGTTCAGCAGGAGCGCAGACGC | 426 | RVKFSRSADAPAYQQGQNQLYN | 427 |
| | CCCCGCGTACCAGCAGGGCCAGAACCAGC | | ELNLGRREEYDVLDKRRGRDPE | |
| | TCTATAACGAGCTCAATCTAGGACGAAGAG | | MGGKPRRKNPQEGLYNELQKDK | |
| | AGGAGTACGATGTTTTGGACAAGAGACGTG | | MAEAYSEIGMKGERRRGKGHDG | |
| | GCCGGGACCCTGAGATGGGGGGAAAGCC | | LYQGLSTATKDTYDALHMQALPP | |
| | GAGAAGGAAGAACCCTCAGGAAGGCCTGT | | R | |
| | ACAATGAACTGCAGAAAGATAAGATGGCGG | | | |
| | AGGCCTACAGTGAGATTGGGATGAAAGGC | | | |
| | GAGCGCCGGAGGGGCAAGGGGCACGATG | | | |
| | GCCTTTACCAGGGTCTCAGTACAGCCACCA | | | |
| | AGGACACCTACGACGCCCTTCACATGCAAG | | | |
| | CTCTTCCACCTCGt | | | |
| Linker | Acg | 428 | T | 429 |
| FRBI\hat{ }\hat{ } | AATGGCACGAAGGCCTGGAAGAGGCCTCAAG | 430 | WFIEGLEEASRLYFGERNVKGMF | 431 |
| | ACTTTACTTTGGTGAACGCAACGTTAAAGG | | EVLEPLHAMMERGPQTLKETSFN | |
| | CATGTTCGAGGTGCTGGAACCCTTGCATGC | | QAYGRDLMEAQEWCRKYMKSG | |
| | AATGATGGAGCGAGGTCCTCAGACACTCAA | | NVKDLLQAWDLYYHVFRRISK | |
| | AGAGACATCTTTTAACCAGGCGTATGGACG | | | |
| | GGACCTCATGGAGGCTCAGGAATGGTGCC | | | |
| | GCAAGTACATGAAAAGTGGGAATGTGAAGG | | | |
| | ATCTGCTGCAAGCATGGGATCTGTATTACC | | | |
| | ACGTGTTTAGACGGATCAGCAAA | | | |
| Linker | Cgtacg | 432 | RT | 433 |
| (BsiWI) | | | | |
| FRBI | TGGCATGAAGGGTTGGAAGAAGCTTCAAG | 434 | WFIEGLEEASRLYFGERNVKGMF | 435 |
| | GCTGTACTTCGGAGAGAGGAACGTGAAGG | | EVLEPLHAMMERGPQTLKETSFN | |
| | GCATGTTTGAGGTTCTTGAACCTCTGCACG | | QAYGRDLMEAQEWCRKYMKSG | |
| | CCATGATGGAACGGGGACCGCAGACACTG | | NVKDLLQAWDLYYHVFRRISK* | |
| | AAAGAAACCTCTTTTAATCAGGCCTACGGC | | | |
| | AGAGACCTGATGGAGGCCCAAGAATGGTG | | | |
| | TAGAAAGTATATGAAATCCGGTAACGTGAA | | | |
| | AGACCTGCTCCAGGCCTGGGACCTTTATTA | | | |
| | CCATGTGTTCAGGCGGATCAGTAAGTAA | | | |

TABLE 8

| | | SEQ ID | | SEQ ID |
|---|---|---|---|---|
| Fragment | Nucleotide | NO: | Polypeptide | NO: |
| FKBP | ATGGGAGTGCAGGTGGAGACTATTAGCCC | 436 | MGVQVETISPGDGRTFPKRGQT | 437 |
| 12v36 | CGGAGATGGCAGAACATTCCCCAAAAGAG | | CVVHYTGMLEDGKKVDSSRDR | |
| | GACAGACTTGCGTCGTGCATTATACTGGAA | | NKPFKFMLGKQEVIRGWEEGVA | |
| | TGCTGGAAGACGGCAAGAAGGTGGACAGC | | QMSVGQRAKLTISPDYAYGATG | |
| | AGCCGGGACCGAAACAAGCCCTTCAAGTTC | | HPGIIPPHATLVFDVELLKLE | |
| | ATGCTGGGGAAGCAGGAAGTGATCCGGGG | | | |
| | CTGGGAGGAAGGAGTCGCACAGATGTCAG | | | |
| | TGGGACAGAGGGCCAAACTGACTATTAGCC | | | |
| | CAGACTACGCTTATGGAGCAACCGGCCAC | | | |
| | CCCGGGATCATTCCCCCTCATGCTACACTG | | | |
| | GTCTTCGATGTGGAGCTGCTGAAGCTGGAA | | | |
| Linker | AGCGGAGGAGGATCCGGA | 438 | SGGGSG | 439 |
| Δ | GTGGACGGGTTTGGAGATGTGGGAGCCCT | 440 | VDGFGDVGALESLRGNADLAYI | 441 |
| Caspase9 | GGAATCCCTGCGGGGCAATGCCGATCTGG | | LSMEPCGHCLIINNVNFCRESGL | |
| | CTTACATCCTGTCTATGGAGCCTTGCGGCC | | RTRTGSNIDCEKLRRRFSSLHF | |
| | ACTGTCTGATCATTAACAATGTGAACTTCTG | | MVEVKGDLTAKKMVLALLELAR | |
| | CAGAGAGAGCGGGCTGCGGACCAGAACAG | | QDHGALDCCVVVILSHGCQASH | |
| | GATCCAATATTGACTGTGAAAAGCTGCGGA | | LQFPGAVYGTDGCPVSVEKIVNI | |
| | GAAGGTTCTCTAGTCTGCACTTTATGGTCG | | FNGTSCPSLGGKPKLFFIQACG | |
| | AGGTGAAAGGCGATCTGACCGCTAAGAAAA | | GEQKDHGFEVASTSPEDESPG | |
| | TGGTGCTGGCCCTGCTGGAACTGGCTCGG | | SNPEPDATPFQEGLRTFDQLDA | |
| | CAGGACCATGGGGCACTGGATTGCTGCGT | | ISSLPTPSDIFVSYSTFPGFVSW | |
| | GGTCGTGATCCTGAGTCACGGCTGCCAGG | | RDPKSGSWYVETLDDIFEQWA | |
| | CTTCACATCTGCAGTTCCCTGGGGCAGTCT | | HSEDLQSLLLRVANAVSVKGIYK | |
| | ATGGAACTGACGGCTGTCCAGTCAGCGTG | | QMPGCFNFLRKKLFFKTSASRA | |
| | GAGAAGATCGTGAACATCTTCAACGGCACC | | | |
| | TCTTGCCCAAGTCTGGGCGGGAAGCCCAA | | | |
| | ACTGTTCTTTATTCAGGCCTGTGGAGGCGA | | | |
| | GCAGAAAGATCACGGCTTCGAAGTGGCTA | | | |
| | GCACCTCCCCCGAGGACGAATCACCTGGA | | | |
| | AGCAACCCTGAGCCAGATGCAACCCCCTTC | | | |
| | CAGGAAGGCCTGAGGACATTTGACCAGCT | | | |
| | GGATGCCATCTCAAGCCTGCCCACACCTTC | | | |
| | TGACATTTTCGTCTCTTACAGTACTTTCCCT | | | |
| | GGATTTGTGAGCTGGCGCGATCCAAAGTCA | | | |
| | GGCAGCTGGTACGTGGAGACACTGGACGA | | | |
| | TATCTTTGAGCAGTGGGCCCATTCTGAAGA | | | |
| | CCTGCAGAGTCTGCTGCTGCGAGTGGCCA | | | |
| | ATGCTGTCTCTGTGAAGGGGATCTACAAAC | | | |
| | AGATGCCAGGATGCTTCAACTTTCTGAGAA | | | |
| | AGAAACTGTTCTTTAAGACCTCCGCATCTA | | | |
| | GGGCC | | | |
| Linker | CCGCGG | 442 | PR | 443 |
| (SacII) | | | | |
| T2A | GAGGGCAGGGGAAGTCTTCTAACATGCGG | 444 | EGRGSLLTCGDVEENPGP | 445 |
| | GGACGTGGAGGAAAATCCCGGGCCC | | | |
| Linker | GCATGCGCCACC | 446 | ACAT | 447 |
| (NcoI) | | | | |
| Sig | ATGGAGTTTGGGTTGTCATGGTTGTTTCTC | 448 | MEFGLSWLFLVAILKGVQCSR | 449 |
| Peptide | GTCGCTATTCTCAAAGGTG | | | |
| | TACAATGCTCCCGC | | | |
| FRP5- | GAAGTCCAATTGCAACAGTCAGGCCCCGAA | 450 | EVQLQQSGPELKKPGETVKISC | 451 |
| VH | TTGAAAAAGCCCGGCGAAACAGTGAAGATA | | KASGYPFTNYGMNVVVKQAPGQ | |
| | TCTTGTAAAGCCTCCGGTTACCCTTTTACGA | | GLKWMGWINTSTGESTFADDF | |
| | ACTATGGAATGAACTGGGTCAAACAAGCCC | | KGRFDFSLETSANTAYLQINNLK | |
| | CTGGACAGGGATTGAAGTGGATGGGATGG | | SEDMATYFCARWEVYHGYVPY | |
| | ATCAATACATCAACAGGCGAGTCTACCTTC | | WGQGTTVTVSS | |
| | GCAGATGATTTCAAAGGTCGCTTTGACTTC | | | |
| | TCACTGGAGACCAGTGCAAATACCGCCTAC | | | |
| | CTTCAGATTAACAATCTTAAAAGCGAGGATA | | | |
| | TGGCAACCTACTTTTGCGCAAGATGGGAAG | | | |
| | TTTATCACGGGTACGTGCCATACTGGGGAC | | | |
| | AAGGAACGACAGTGACAGTTAGTAGC | | | |
| Flex- | GGCGGTGGAGGCTCCGGTGGAGGCGGCT | 452 | GGGGSGGGGSGGGGS | 453 |
| linker | CTGGAGGAGGAGGTTCA | | | |
| FRP5VL | GACATCCAATTGACACAATCACACAAATTTC | 454 | DIQLTQSHKFLSTSVGDRVSITC | 455 |
| | TCTCAACTTCTGTAGGAGACAGAGTGAGCA | | KASQDVYNAVAWYQQKPGQSP | |
| | TAACCTGCAAAGCATCCCAGGACGTGTACA | | KLLIYSASSRYTGVPSRFTGSGS | |
| | ATGCTGTGGCTTGGTACCAACAGAAGCCTG | | GPDFTFTISSVQAEDLAVYFCQ | |
| | GACAATCCCCAAAATTGCTGATTTATTCTGC | | QHFRTPFTFGSGTKLEIKAL | |
| | CTCTAGTAGGTACACTGGGGTACCTTCTCG | | | |
| | GTTTACGGGCTCTGGGTCCGGACCAGATTT | | | |
| | CACGTTCACAATCAGTTCCGTTCAAGCTGA | | | |
| | AGACCTCGCTGTTTATTTTTGCCAGCAGCA | | | |
| | CTTCCGAACCCCTTTTACTTTTGGCTCAGG | | | |
| | CACTAAGTTGGAAATCAAGGCTTTG | | | |
| Linker | Atgcat | 456 | MH | 457 |
| (NsiI) | | | | |
| CD34 | GAACTTCCTACTCAGGGGACTTTCTCAAAC | 458 | ELPTQGTFSNVSTNVS | 459 |
| epitope | GTTAGCACAAACGTAAGT | | | |
| CD8a | CCCGCCCCAAGACCCCCCACACCTGCGCC | 460 | PAPRPPTPAPTIASQPLSLRPEA | 461 |
| stalk | GACCATTGCTTCTCAACCCCTGAGTTTGAG | | CRPAAGGAVHTRGLDFACD | |
| | ACCCGAGGCCTGCCGGCCAGCTGCCGGC | | | |
| | GGGGCCGTGCATACAAGAGGACTCGATTT | | | |
| | CGCTTGCGAC | | | |
| CD8tm | ATCTATATCTGGGCACCTCTCGCTGGCACC | 462 | IYIWAPLAGTCGVLLLSLVITLYC | 463 |
| + | TGTGGAGTCCTTCTGCTCAGCCTGGTTATT | | NHRNRRRVCKCPR | |
| stop tf | ACTCTGTACTGTAATCACCGGAATCGCCGC | | | |
| | CGCGTTTGTAAGTGTCCCAGG | | | |
| Linker | gtcgac | 464 | VD | 465 |
| (SalI) | | | | |
| MyD88 | ATGGCCGCTGGGGGCCCAGGCGCCGGAT | 466 | MAAGGPGAGSAAPVSSTSSLPL | 467 |
| | CAGCTGCTCCCGTATCTTCTACTTCTTCTTT | | AALNMRVRRRLSLFLNVRTQVA | |
| | GCCGCTGGCTGCTCTGAACATGCGCGTGA | | ADWTALAEEMDFEYLEIRQLET | |
| | GAAGACGCCTCTCCCTGTTCCTTAACGTTC | | QADPTGRLLDAWQGRPGASVG | |
| | GCACACAAGTCGCTGCCGATTGGACCGCC | | RLLDLLTKLGRDDVLLELGPSIE | |
| | CTTGCCGAAGAAATGGACTTTGAATACCTG | | EDCQKYILKQQQEEAEKPLQVA | |
| | GAAATTAGACAACTTGAAACACAGGCCGAC | | AVDSSVPRTAELAGITTLDDPLG | |
| | CCCACTGGCAGACTCCTGGACGCATGGCA | | HMPERFDAFICYCPSDI | |
| | GGGAAGACCTGGTGCAAGCGTTGGACGGC | | | |
| | TCCTGGATCTCCTGACAAAACTGGGACGCG | | | |
| | ACGACGTACTGCTTGAACTCGGACCTAGCA | | | |
| | TTGAAGAAGACTGCCAAAAATATATCCTGAA | | | |
| | ACAACAACAAGAAGAAGCCGAAAAACCTCT | | | |
| | CCAAGTCGCAGCAGTGGACTCATCAGTACC | | | |
| | CCGAACAGCTGAGCTTGCTGGGATTACTAC | | | |
| | ACTCGACGACCCACTCGGACATATGCCTGA | | | |
| | AAGATTCGACGCTTTCATTTGCTATTGCCCC | | | |
| | TCTGACATA | | | |
| dCD40 | AAGAAAGTTGCAAAGAAACCCACAAATAAA | 468 | KKVAKKPTNKAPHPKQEPQEIN | 469 |
| | GCCCCACACCCTAAACAGGAACCCCAAGAA | | FPDDLPGSNTAAPVQETLHGCQ | |
| | ATCAATTTCCCAGATGATCTCCCTGGATCTA | | PVTQEDGKESRISVQERQ | |
| | ATACTGCCGCCCCGGTCCAAGAAACCCTG | | | |
| | CATGGTTGCCAGCCTGTCACCCAAGAGGA | | | |
| | CGGAAAAGAATCACGGATTAGCGTACAAGA | | | |
| | GAGACAA | | | |
| CD3z | AGAGTGAAGTTCAGCAGGAGCGCAGACGC | 470 | RVKFSRSADAPAYQQGQNQLY | 471 |
| | CCCCGCGTACCAGCAGGGCCAGAACCAGC | | NELNLGRREEYDVLDKRRGRD | |
| | TCTATAACGAGCTCAATCTAGGACGAAGAG | | PEMGGKPRRKNPQEGLYNELQ | |
| | AGGAGTACGATGTTTTGGACAAGAGACGTG | | KDKMAEAYSEIGMKGERRRGK | |
| | GCCGGGACCCTGAGATGGGGGGAAAGCC | | GHDGLYQGLSTATKDTYDALHM | |
| | GAGAAGGAAGAACCCTCAGGAAGGCCTGT | | QALPPR | |
| | ACAATGAACTGCAGAAAGATAAGATGGCGG | | | |
| | AGGCCTACAGTGAGATTGGGATGAAAGGC | | | |
| | GAGCGCCGGAGGGGCAAGGGGCACGATG | | | |
| | GCCTTTACCAGGGTCTCAGTACAGCCACCA | | | |
| | AGGACACCTACGACGCCCTTCACATGCAAG | | | |
| | CTCTTCCACCTCGt | | | |
| Linker | Acg | 472 | T | 473 |
| FRBI\hat{ }\hat{ } | TGGCACGAAGGCCTGGAAGAGGCCTCAAG | 474 | WFIEGLEEASRLYFGERNVKGM | 475 |
| | ACTTTACTTTGGTGAACGCAACGTTAAAGG | | FEVLEPLHAMMERGPQTLKETS | |
| | CATGTTCGAGGTGCTGGAACCCTTGCATGC | | FNQAYGRDLMEAQEWCRKYMK | |
| | AATGATGGAGCGAGGTCCTCAGACACTCAA | | SGNVKDLLQAWDLYYHVFRRIS | |
| | AGAGACATCTTTTAACCAGGCGTATGGACG | | K | |
| | GGACCTCATGGAGGCTCAGGAATGGTGCC | | | |
| | GCAAGTACATGAAAAGTGGGAATGTGAAGG | | | |
| | ATCTGCTGCAAGCATGGGATCTGTATTACC | | | |
| | ACGTGTTTAGACGGATCAGCAAA | | | |
| Linker | Cgtacg | 476 | RT | 477 |
| (BsiWI) | | | | |
| FRBI | TGGCATGAAGGGTTGGAAGAAGCTTCAAG | 478 | WFIEGLEEASRLYFGERNVKGM | 479 |
| | GCTGTACTTCGGAGAGAGGAACGTGAAGG | | FEVLEPLHAMMERGPQTLKETS | |
| | GCATGTTTGAGGTTCTTGAACCTCTGCACG | | FNQAYGRDLMEAQEWCRKYMK | |
| | CCATGATGGAACGGGGACCGCAGACACTG | | SGNVKDLLQAWDLYYHVFRRIS | |
| | AAAGAAACCTCTTTTAATCAGGCCTACGGC | | K* | |
| | AGAGACCTGATGGAGGCCCAAGAATGGTG | | | |
| | TAGAAAGTATATGAAATCCGGTAACGTGAA | | | |
| | AGACCTGCTCCAGGCCTGGGACCTTTATTA | | | |
| | CCATGTGTTCAGGCGGATCAGTAAGTAA | | | |

TABLE 9
pBP0545.pSFG.iCasp9.2A.Her2scFv.Q.CD8stm.MC-zeta

| | | SEQ ID | | SEQ ID |
|---|---|---|---|---|
| Fragment | Nucleotide | NO: | Polypeptide | NO: |
| Kozak | GCCACC | 480 | N/A | |
| (ribo- | | | | |
| some- | | | | |
| binding | | | | |
| seq.) | | | | |
| FKBP21v36 | ATGGGAGTGCAGGTGGAGACTATTAGCCC | 481 | MGVQVETISPGDGRTFPKRGQ | 482 |
| | CGGAGATGGCAGAACATTCCCCAAAAGAG | | TCVVHYTGMLEDGKKVDSSRD | |
| | GACAGACTTGCGTCGTGCATTATACTGGAA | | RNKPFKFMLGKQEVIRGWEEG | |
| | TGCTGGAAGACGGCAAGAAGGTGGACAGC | | VAQMSVGQRAKLTISPDYAYG | |
| | AGCCGGGACCGAAACAAGCCCTTCAAGTTC | | ATGHPGIIPPHATLVFDVELLKL | |
| | ATGCTGGGGAAGCAGGAAGTGATCCGGGG | | E | |
| | CTGGGAGGAAGGAGTCGCACAGATGTCAG | | | |
| | TGGGACAGAGGGCCAAACTGACTATTAGCC | | | |
| | CAGACTACGCTTATGGAGCAACCGGCCAC | | | |
| | CCCGGGATCATTCCCCCTCATGCTACACTG | | | |
| | GTCTTCGATGTGGAGCTGCTGAAGCTGGAA | | | |
| Linker | AGCGGAGGAGGATCCGGA | 483 | SGGGSG | 484 |
| Δ | GTGGACGGGTTTGGAGATGTGGGAGCCCT | 485 | VDGFGDVGALESLRGNADLAY | 486 |
| Caspase9 | GGAATCCCTGCGGGGCAATGCCGATCTGG | | ILSMEPCGHCLIINNVNFCRES | |
| | CTTACATCCTGTCTATGGAGCCTTGCGGCC | | GLRTRTGSNIDCEKLRRRFSSL | |
| | ACTGTCTGATCATTAACAATGTGAACTTCTG | | HFMVEVKGDLTAKKMVLALLE | |
| | CAGAGAGAGCGGGCTGCGGACCAGAACAG | | LARQDHGALDCCVVVILSHGC | |
| | GATCCAATATTGACTGTGAAAAGCTGCGGA | | QASHLQFPGAVYGTDGCPVSV | |
| | GAAGGTTCTCTAGTCTGCACTTTATGGTCG | | EKIVNIFNGTSCPSLGGKPKLF | |
| | AGGTGAAAGGCGATCTGACCGCTAAGAAAA | | FIQACGGEQKDHGFEVASTSP | |
| | TGGTGCTGGCCCTGCTGGAACTGGCTCGG | | EDESPGSNPEPDATPFQEGLR | |
| | CAGGACCATGGGGCACTGGATTGCTGCGT | | TFDQLDAISSLPTPSDIFVSYST | |
| | GGTCGTGATCCTGAGTCACGGCTGCCAGG | | FPGFVSWRDPKSGSWYVETL | |
| | CTTCACATCTGCAGTTCCCTGGGGCAGTCT | | DDIFEQWAHSEDLQSLLLRVA | |
| | ATGGAACTGACGGCTGTCCAGTCAGCGTG | | NAVSVKGIYKQMPGCFNFLRK | |
| | GAGAAGATCGTGAACATCTTCAACGGCACC | | KLFFKTSASRA | |
| | TCTTGCCCAAGTCTGGGCGGGAAGCCCAA | | | |
| | ACTGTTCTTTATTCAGGCCTGTGGAGGCGA | | | |
| | GCAGAAAGATCACGGCTTCGAAGTGGCTA | | | |
| | GCACCTCCCCCGAGGACGAATCACCTGGA | | | |
| | AGCAACCCTGAGCCAGATGCAACCCCCTTC | | | |
| | CAGGAAGGCCTGAGGACATTTGACCAGCT | | | |
| | GGATGCCATCTCAAGCCTGCCCACACCTTC | | | |
| | TGACATTTTCGTCTCTTACAGTACTTTCCCT | | | |
| | GGATTTGTGAGCTGGCGCGATCCAAAGTCA | | | |
| | GGCAGCTGGTACGTGGAGACACTGGACGA | | | |
| | TATCTTTGAGCAGTGGGCCCATTCTGAAGA | | | |
| | CCTGCAGAGTCTGCTGCTGCGAGTGGCCA | | | |
| | ATGCTGTCTCTGTGAAGGGGATCTACAAAC | | | |
| | AGATGCCAGGATGCTTCAACTTTCTGAGAA | | | |
| | AGAAACTGTTCTTTAAGACCTCCGCATCTA | | | |
| | GGGCC | | | |
| Linker | CCGCGG | 487 | PR | 488 |
| (SaclI) | | | | |
| T2A | GAGGGCAGGGGAAGTCTTCTAACATGCGG | 489 | EGRGSLLTCGDVEENPGP | 490 |
| | GGACGTGGAGGAAAATCCCGGGCCC | | | |
| Linker | GCATGCGCCACC | 491 | 492 | ACAT |
| (NcoI) | | | | |
| Sig | ATGGAGTTTGGGTTGTCATGGTTGTTTCTC | 493 | MEFGLSWLFLVAILKGVQCSR | 494 |
| Peptide | GTCGCTATTCTCAAAGGTG | | | |
| | TACAATGCTCCCGC | | | |
| FRP5- | GAAGTCCAATTGCAACAGTCAGGCCCCGAA | 495 | EVQLQQSGPELKKPGETVKIS | 496 |
| VH | TTGAAAAAGCCCGGCGAAACAGTGAAGATA | | CKASGYPFTNYGMNWVKQAP | |
| (anti- | TCTTGTAAAGCCTCCGGTTACCCTTTTACGA | | GQGLKWMGWINTSTGESTFA | |
| Her2) | ACTATGGAATGAACTGGGTCAAACAAGCCC | | DDFKGRFDFSLETSANTAYLQI | |
| | CTGGACAGGGATTGAAGTGGATGGGATGG | | NNLKSEDMATYFCARWEVYH | |
| | ATCAATACATCAACAGGCGAGTCTACCTTC | | GYVPYWGQGTTVTVSS | |
| | GCAGATGATTTCAAAGGTCGCTTTGACTTC | | | |
| | TCACTGGAGACCAGTGCAAATACCGCCTAC | | | |
| | CTTCAGATTAACAATCTTAAAAGCGAGGATA | | | |
| | TGGCAACCTACTTTTGCGCAAGATGGGAAG | | | |
| | TTTATCACGGGTACGTGCCATACTGGGGAC | | | |
| | AAGGAACGACAGTGACAGTTAGTAGC | | | |
| Flex- | GGCGGTGGAGGCTCCGGTGGAGGCGGCT | 497 | GGGGSGGGGSGGGGS | 498 |
| linker | CTGGAGGAGGAGGTTCA | | | |
| FRP5VL | GACATCCAATTGACACAATCACACAAATTTC | 499 | DIQLTQSHKFLSTSVGDRVSIT | 500 |
| (anti- | TCTCAACTTCTGTAGGAGACAGAGTGAGCA | | CKASQDVYNAVAWYQQKPGQ | |
| Her2) | TAACCTGCAAAGCATCCCAGGACGTGTACA | | SPKLLIYSASSRYTGVPSRFTG | |
| | ATGCTGTGGCTTGGTACCAACAGAAGCCTG | | SGSGPDFTFTISSVQAEDLAVY | |
| | GACAATCCCCAAAATTGCTGATTTATTCTGC | | FCQQHFRTPFTFGSGTKLEIKA | |
| | CTCTAGTAGGTACACTGGGGTACCTTCTCG | | L | |
| | GTTTACGGGCTCTGGGTCCGGACCAGATTT | | | |
| | CACGTTCACAATCAGTTCCGTTCAAGCTGA | | | |
| | AGACCTCGCTGTTTATTTTTGCCAGCAGCA | | | |
| | CTTCCGAACCCCTTTTACTTTTGGCTCAGG | | | |
| | CACTAAGTTGGAAATCAAGGCTTTG | | | |
| Linker | Atgcat | 501 | MH | 502 |
| (NsiI) | | | | |
| CD34 | GAACTTCCTACTCAGGGGACTTTCTCAAAC | 503 | ELPTQGTFSNVSTNVS | 504 |
| epitope | GTTAGCACAAACGTAAGT | | | |
| CD8a | CCCGCCCCAAGACCCCCCACACCTGCGCC | 505 | PAPRPPTPAPTIASQPLSLRPE | 506 |
| stalk | GACCATTGCTTCTCAACCCCTGAGTTTGAG | | ACRPAAGGAVHTRGLDFACD | |
| | ACCCGAGGCCTGCCGGCCAGCTGCCGGC | | | |
| | GGGGCCGTGCATACAAGAGGACTCGATTT | | | |
| | CGCTTGCGAC | | | |
| CD8tm | ATCTATATCTGGGCACCTCTCGCTGGCACC | 507 | IYIWAPLAGTCGVLLLSLVITLY | 508 |
| + | TGTGGAGTCCTTCTGCTCAGCCTGGTTATT | | CNHRNRRRVCKCPR | |
| stop tf | ACTCTGTACTGTAATCACCGGAATCGCCGC | | | |
| | CGCGTTTGTAAGTGTCCCAGG | | | |
| Linker | gtcgac | 509 | VD | 510 |
| (SalI) | | | | |
| MyD88 | ATGGCCGCTGGGGGCCCAGGCGCCGGAT | 511 | MAAGGPGAGSAAPVSSTSSLP | 512 |
| | CAGCTGCTCCCGTATCTTCTACTTCTTCTTT | | LAALNMRVRRRLSLFLNVRTQ | |
| | GCCGCTGGCTGCTCTGAACATGCGCGTGA | | VAADWTALAEEMDFEYLEIRQ | |
| | GAAGACGCCTCTCCCTGTTCCTTAACGTTC | | LETQADPTGRLLDAWQGRPG | |
| | GCACACAAGTCGCTGCCGATTGGACCGCC | | ASVGRLLDLLTKLGRDDVLLEL | |
| | CTTGCCGAAGAAATGGACTTTGAATACCTG | | GPSIEEDCQKYILKQQQEEAEK | |
| | GAAATTAGACAACTTGAAACACAGGCCGAC | | PLQVAAVDSSVPRTAELAGITT | |
| | CCCACTGGCAGACTCCTGGACGCATGGCA | | LDDPLGHMPERFDAFICYCPS | |
| | GGGAAGACCTGGTGCAAGCGTTGGACGGC | | DI | |
| | TCCTGGATCTCCTGACAAAACTGGGACGCG | | | |
| | ACGACGTACTGCTTGAACTCGGACCTAGCA | | | |
| | TTGAAGAAGACTGCCAAAAATATATCCTGAA | | | |
| | ACAACAACAAGAAGAAGCCGAAAAACCTCT | | | |
| | CCAAGTCGCAGCAGTGGACTCATCAGTACC | | | |
| | CCGAACAGCTGAGCTTGCTGGGATTACTAC | | | |
| | ACTCGACGACCCACTCGGACATATGCCTGA | | | |
| | AAGATTCGACGCTTTCATTTGCTATTGCCCC | | | |
| | TCTGACATA | | | |
| dCD40 | AAGAAAGTTGCAAAGAAACCCACAAATAAA | 513 | KKVAKKPTNKAPHPKQEPQEI | 514 |
| | GCCCCACACCCTAAACAGGAACCCCAAGAA | | NFPDDLPGSNTAAPVQETLHG | |
| | ATCAATTTCCCAGATGATCTCCCTGGATCTA | | CQPVTQEDGKESRISVQERQ | |
| | ATACTGCCGCCCCGGTCCAAGAAACCCTG | | | |
| | CATGGTTGCCAGCCTGTCACCCAAGAGGA | | | |
| | CGGAAAAGAATCACGGATTAGCGTACAAGA | | | |
| | GAGACAA | | | |
| CD3z | AGAGTGAAGTTCAGCAGGAGCGCAGACGC | 515 | RVKFSRSADAPAYQQGQNQL | 516 |
| | CCCCGCGTACCAGCAGGGCCAGAACCAGC | | YNELNLGRREEYDVLDKRRGR | |
| | TCTATAACGAGCTCAATCTAGGACGAAGAG | | DPEMGGKPRRKNPQEGLYNE | |
| | AGGAGTACGATGTTTTGGACAAGAGACGTG | | LQKDKMAEAYSEIGMKGERRR | |
| | GCCGGGACCCTGAGATGGGGGGAAAGCC | | GKGHDGLYQGLSTATKDTYDA | |
| | GAGAAGGAAGAACCCTCAGGAAGGCCTGT | | LHMQALPPR* | |
| | ACAATGAACTGCAGAAAGATAAGATGGCGG | | | |
| | AGGCCTACAGTGAGATTGGGATGAAAGGC | | | |
| | GAGCGCCGGAGGGGCAAGGGGCACGATG | | | |
| | GCCTTTACCAGGGTCTCAGTACAGCCACCA | | | |
| | AGGACACCTACGACGCCCTTCACATGCAAG | | | |
| | CTCTTCCACCTCGTtga | | | |

[0686] Methods discussed herein, including, but not limited to, methods for constructing vectors, assays for activity or function, administration to patients, transfecting or transforming cells, assay, and methods for monitoring patients may also be found in the following patents and patent applications, which are hereby incorporated by reference herein in their entirety.

[0687] U.S. patent application Ser. No. 14/210,034, titled METHODS FOR CONTROLLING T CELL PROLIFERATION, filed Mar. 13, 2014; U.S. patent application Ser. No. 13/112,739, filed May 20, 2011, issued as U.S. Pat. No. 9,089,520, Jul. 28, 2015, and entitled METHODS FOR INDUCING SELECTIVE APOPTOSIS; U.S. patent application Ser. No. 14/622,018, filed Feb. 13, 2014, titled METHODS FOR ACTIVATING T CELLS USING AN INDUCIBLE CHIMERIC POLYPEPTIDE; U.S. patent application Ser. No. 13/112,739, filed May 20, 2011, titled METHODS FOR INDUCING SELECTIVE APOPTOSIS; U.S. patent application Ser. No. 13/792,135, filed Mar. 10, 2013, titled MODIFIED CASPASE POLYPEPTIDES AND USES THEREOF; U.S. patent application Ser. No. 14/296,404, filed Jun. 4, 2014, titled METHODS FOR INDUCING PARTIAL APOPTOSIS USING CASPASE POLYPEPTIDES; U.S. Provisional Patent Application Ser. No. 62/044,885, filed Sep. 2, 2014, and U.S. patent application Ser. No. 14/842,710, filed Sep. 1, 2015, each titled COSTIMULATION OF CHIMERIC ANTIGEN RECEPTORS BY MyD88 AND CD40 POLYPEPTIDES; U.S. patent application Ser. No. 14/640,554, filed 6 Mar., 2015, titled CASPASE POLYPEPTIDES HAVING MODIFIED ACTIVITY AND USES THEREOF; U.S. Pat. No. 7,404,950, issued Jun. 29, 2008, to Spencer, D. et al., U.S. patent application Ser. No. 12/445,939 by Spencer, D., et al., filed Oct. 26, 2010; U.S. patent application Ser. No. 12/563,991 by Spencer, D., et al., filed Sep. 21, 2009; Ser. No. 13/087,329 by Slawin, K., et al., filed Apr. 14, 2011; Ser. No. 13/763,591 by Spencer, D., et al., filed Feb. 8, 2013; and International Patent Application Number PCT/US2014/022004, filed 7 Mar. 2014, published as PCT/US2014/022004 on 9 Oct. 2014, titled MODIFIED CASPASE POLYPEPTIDES AND USES THEREOF.

### Example 18

### FRB-Based Scaffold Assembly and Activation of iCaspase-9

[0688] To determine if iCaspase-9 could be aggregated by tandem multimers of FRB_{L}, one to four tandem copies of FRB_{L} were subcloned into an expression vector, pSH1, driving transgene expression from an SRa promoter. A subset of constructs also contained the myristoylation-targeting domain from v-Src for membrane localization of the FRB-scaffold (FIG. 12A). 293 cells were transfected with the SRα-SEAP reporter plasmid along with FKBP12-ΔCaspase-9 (iCaspase-9/CaspaCIDe), plus 1 of several FRB-based, non-myristoylated scaffold proteins containing 0, 1, or 4 tandem copies of FRB_{L}. Addition of either rapamycin or analog, C7-isopropoxy-rapamycin, created by the method of Luengo et al., (Luengo J I (95) Chem & Biol 2, 471-81. Luengo J I (94) J. Org Chem 59: 6512-13), led to a diminution of reporter activity when the 4×FRB construct was present, consistent with cell death, as predicted (FIG. 8B, 10D, 10E) with a IC₅₀˜3 nM (FIG. 12B). Addition of rapamycin had no effect on reporter activity when only 1 (or 0) FRB domain was present, which would preclude oligomerization of iCasp9 (FIG. 100). Similar results were obtained when the FRB-scaffold was myristoylated (FIG. 12C) to localize the scaffold to the plasma membrane. Thus, the Caspase-9 polypeptide can be activated with rapamycin or analogs when oligomerized on a FRB-based scaffold.

### Example 19

### FKBP12-Based Scaffolds Assemble and Activate FRB-ΔCaspase-9

[0689] To determine if the polarity of heterodimerization and Caspase-9 assembly could be reversed, one to four 1 to 4 tandem copies of FKBP12 were subcloned into expression vector, pSH1, as above. (FIG. 13A). As above, 293 cells were transfected with the SRα-SEAP reporter plasmid along with FRBL-ΔCaspase-9, plus a non-myristoylated scaffold protein containing 1 or 4 tandem copies of FKBP12. Addition of either rapamycin or analog, C7-isopropoxy-rapamycin, led to a diminution of reporter activity when the 4×FRB_{L} construct was present, consistent with cell death with a IC₅₀˜3 nM (FIG. 13B). Addition of rapamycin had no effect on reporter activity when only 1 (or 0) FKBP domain was present, similar to the results in FIG. 12. Thus, Caspase-9 can be activated with rapamycin or analogs when oligomerized on a FRB or FKBP12-based scaffold.

### Example 20

### FRB-Based Scaffold Assembly and Activation of iCaspase-9 in Primary T Cells

[0690] To determine if iCaspase-9 could be aggregated by tandem multimers of FRB_{L} in primary, non-transformed T cells, zero to three 3 tandem copies of FRBL were subcloned into a retroviral expression vector, pBP0220—pSFG-iC9.T2A-ΔCD19, encoding Caspase-9 (CaspaCIDe) along with a non-signaling truncated version of CD19 that served as a surface marker. The resulting unified plasmid vectors, named pBP0756-iC9.T2A-ΔCD19.P2A-FRB_{L}, pBP0755-iC9.T2A-ΔCD19.P2A-FRB_{L}2, and pBP0757-iC9.T2A-ΔCD19.P2A-FRB_{L}3, were subsequently used to make infectious γ-retroviruses (γ-RVs) encoding scaffolds of 1, 2 or 3 tandem FRB_{L} domains, respectively.

[0691] T cells from 3 different donors were transduced with the vectors and plated with varying rapamycin dilutions. After 24 and 48 hours, cell aliquots were harvested, stained with anti-CD19 APC and analyzed by flow cytometry. Cells were initially gated on live lymphocytes by FSC vs SSC and then plotted as a CD19 histogram and subgated for high, medium and low expression within the CD19⁺ gate. Line graphs were prepared to represent the relative percentage of the total cell population that express high levels of CD19, normalized to the no “0” drug control (FIG. 14). Similar to the surrogate SEAP reporter assay performed in transformed epithelial cells, as rapamycin concentration increased, the percentage of CD19hi cells decreased in cells expressing Caspase-9 and FRB_{L}2 or FRB_{L}3, but not in cells expressing Caspase-9 along with 0 or 1 FRB_{L} domains, indicating that rapamycin induces heterodimerization between the FRB-based scaffolds and iCaspase9, leading to Caspase-9 dimerization and cell death. Similar results were seen when rapamycin was replaced with C7-isopropoxyrapamycin.

### Example 21

### FRB-Based Scaffolds Attached to Signaling Molecules can Dimerize and Activate iCaspase-9

[0692] To determine if multimers of FRB would still act as a recruitment scaffold to enable rapalog-mediated Caspase-9 dimerization when attached to another signaling domain, 1 or 2 FRB_{L} domains were fused to the potent chimeric stimulatory molecule, MyD88/CD40, to derive iMC.FRB_{L} (pBP0655) and iMC.FRB_{L}2 (pBP0498), respectively (FIG. 9B). As an initial test, 293 cells were transiently transfected with reporter plasmid SRα-SEAP, Caspase-9, a 1^{st} generation anti-HER2 CAR (pBP0488) and (pBP0655 or pBP0498) (FIG. 15). Control transfections contained Caspase-9 (pBP0044) alone or eGFP expression vector (pBP0047). In the presence of rimiducid, Caspase-9-containing cells, but not control eGFP-cells, were killed by Caspase-9 homodimerization as usual, reflected by diminution of SEAP activity (FIG. 15, left); however, rapamycin only triggered SEAP reduction in cells expressing iMC.FRB_{L}2 and Caspase-9, but not cells expressing iMC.FRB_{L} and Caspase-9, or control cells. Thus, heterodimerizer-mediated activation of Caspase-9 is possible in cells containing multimers of FRB_{L} fused to distinct proteins, such as MyD88/CD40.

[0693] In a second test for rapalog-mediated scaffold-based activation of Caspase-9, 293 cells were transiently transfected with SRα-SEAP reporter plasmid, plus myristoylated or non-myristoylated inducible iMC co-expressed with 1^{st} generation anti-CD19 CAR, plus FRB_{L}2-fused Caspase-9 (plasmid pBP0467) (FIG. 16). After 24 hours, cells were treated with log dilutions of rimiducid, rapamycin, or C7-isopropoxy (IsoP)-rapamycin. Unlike FKBP12-linked Caspase-9 (CaspaCIDe), FRB_{L}2-Caspase-9 is not activated by rimiducid; however, it is activated by rapamycin or C7-isopropoxy-rapamycin when tandem FKBPs are present. Thus, rapamcyin and analogs can activate Caspase-9 via a molecular scaffold comprised of FRB or FKBP12 domains.

### Example 22

### The iMC “Switch”, FKBPx2. MyD88. CD40, Creates a Scaffold for FRB_{L}2. Caspase9 in the Presence of Rapamycin to Induce Cell Death

[0694] The use of iMC as an FKBP12-based scaffold for activating FRB_{L}2-Caspase-9 was tested in primary T cells (FIG. 17). Primary T cells (2 donors) were transduced with γ-RVs derived from SFG-Δmyr.iMC.2A-CD19 (pBP0606) and SFG-FRB_{L}2. Caspase9.2A-Q.8stm.zeta (pBP0668). Transduced T cells were then plated with 5-fold dilutions of rapamycin. After 24 hours, cells were harvested and analyzed by flow cytometry for expression of iMC (via anti-CD19-APC), Caspase-9 (via anti-CD34-PE), and T cell identity (via anti-CD3-PerCPCy5.5). Cells were initially gated for lymphocyte morphology by FSC vs SSC, followed by CD3 expression (˜99% of lymphocytes). To focus on doubly transduced cells, CD3⁺ lymphocytes were gated on CD19⁺ (ΔMyr.iMC.2A-CD19) and CD34⁺ (FRB_{I}2. Caspase9.2A-Q.8stm.zeta) expression. To normalize gated populations, percentages of CD34⁺CD19⁺ cells were divided by percent CD19⁺CD34⁻ cells within each sample as an internal control. Those values were then normalized to drug-free wells for each transduction, which were set at 100%. The results show rapid and efficient elimination of doubly transduced cells in the presence of relatively low (2 nM) levels of rapamycin (FIG. 17A, C). Similar analysis was applied to the Hi-, Med-, and Lo-expressing cells within the CD34⁺CD19⁺ gate (FIG. 17B). As rapamycin concentrations increase, percentage of CD34⁺CD19⁺ cells decrease, indicating elimination of cells. Finally, T cells from a single donor were transduced with ΔMyriMC.2A-CD19 (pBP0606) and FRB_{L}2. Caspase9.2A-Q.8stm.zeta (pBP0668) and plated in IL-2-containing media along with varying concentrations of rapamycin for 24 or 48 hrs. After 24 or 48 hrs, cells were harvested and analyzed by flow, as above. Interestingly, although elimination of cells expressing high levels of both transgenes was nearly complete at 24 hours, by 48 hours even cells expressing low levels of both transgenes are killed by rapamycin, showing the efficiency of the process in primary T cells (FIG. 17D).

### Example 23

### Examples of Plasmids and Sequences Discussed in Examples 17-21

[0695] pBP0044: pSH1-iCaspase9 wt

| | | SEQ ID | | SEQ ID |
|---|---|---|---|---|
| Fragment | Nucleotide | NO: | Peptide | NO: |
| Linker | ATG-CTCGAG | 517 | MLE | 518 |
| FKBPv36 | GGAGTGCAGGTGGAgACtATCT | 519 | GVQVETISPGDGRTFP | 520 |
| | CCCCAGGAGACGGGCGCACCT | | KRGQTCVVHYTGMLE | |
| | TCCCCAAGCGCGGCCAGACCT | | DGKKVDSSRDRNKPF | |
| | GCGTGGTGCACTACACCGGGA | | KFMLGKQEVIRGWEE | |
| | TGCTTGAAGATGGAAAGAAAGT | | GVAQMSVGQRAKLTIS | |
| | TGATTCCTCCCGGGACAGAAA | | PDYAYGATGHPGIIPP | |
| | CAAGCCCTTTAAGTTTATGCTA | | HATLVFDVELLKL | |
| | GGCAAGCAGGAGGTGATCCGA | | | |
| | GGCTGGGAAGAAGGGGTTGCC | | | |
| | CAGATGAGTGTGGGTCAGAGA | | | |
| | GCCAAACTGACTATATCTCCAG | | | |
| | ATTATGCCTATGGTGCCACTGG | | | |
| | GCACCCAGGCATCATCCCACC | | | |
| | ACATGCCACTCTCGTCTTCGAT | | | |
| | GTGGAGCTTCTAAAACTGGA | | | |
| Linker | ATCTGGCGGTGGATCCGGA | 521 | SGGGSG | 522 |
| Δ | GTCGACGGATTTGGTGATGTC | 523 | VDGFGDVGALESLRG | 524 |
| Caspase9 | GGTGCTCTTGAGAGTTTGAGG | | NADLAYILSMEPCGHC | |
| | GGAAATGCAGATTTGGCTTACA | | LIINNVNFCRESGLRTR | |
| | TCCTGAGCATGGAGCCCTGTG | | TGSNIDCEKLRRRFSS | |
| | GCCACTGCCTCATTATCAACAALH | | FMVEVKGDLTAKKM | |
| | TGTGAACTTCTGCCGTGAGTCC | | VLALLELARQDHGALD | |
| | GGGCTCCGCACCCGCACTGGC | | CCVVVILSHGCQASHL | |
| | TCCAACATCGACTGTGAGAAGT | | QFPGAVYGTDGCPVS | |
| | TGCGGCGTCGCTTCTCCTCGC | | VEKIVNIFNGTSCPSLG | |
| | TGCATTTCATGGTGGAGGTGAA | | GKPKLFFIQACGGEQK | |
| | GGGCGACCTGACTGCCAAGAA | | DHGFEVASTSPEDESP | |
| | AATGGTGCTGGCTTTGCTGGA | | GSNPEPDATPFQEGLR | |
| | GCTGGCGCgGCAGGACCACGG | | TFDQLDAISSLPTPSDI | |
| | TGCTCTGGACTGCTGCGTGGT | | FVSYSTFPGFVSWRDP | |
| | GGTCATTCTCTCTCACGGCTGT | | KSGSVVYVETLDDIFEQ | |
| | CAGGCCAGCCACCTGCAGTTC | | WAHSEDLQSLLLRVAN | |
| | CCAGGGGCTGTCTACGGCACA | | AVSVKGIYKQMPGCFN | |
| | GATGGATGCCCTGTGTCGGTC | | FLRKKLFFKTS | |
| | GAGAAGATTGTGAACATCTTCA | | | |
| | ATGGGACCAGCTGCCCCAGCC | | | |
| | TGGGAGGGAAGCCCAAGCTCT | | | |
| | TTTTCATCCAGGCCTGTGGTGG | | | |
| | GGAGCAGAAAGACCATGGGTT | | | |
| | TGAGGTGGCCTCCACTTCCCC | | | |
| | TGAAGACGAGTCCCCTGGCAG | | | |
| | TAACCCCGAGCCAGATGCCAC | | | |
| | CCCGTTCCAGGAAGGTTTGAG | | | |
| | GACCTTCGACCAGCTGGACGC | | | |
| | CATATCTAGTTTGCCCACACCC | | | |
| | AGTGACATCTTTGTGTCCTACT | | | |
| | CTACTTTCCCAGGTTTTGTTTC | | | |
| | CTGGAGGGACCCCAAGAGTGG | | | |
| | CTCCTGGTACGTTGAGACCCT | | | |
| | GGACGACATCTTTGAGCAGTG | | | |
| | GGCTCACTCTGAAGACCTGCA | | | |
| | GTCCCTCCTGCTTAGGGTCGC | | | |
| | TAATGCTGTTTCGGTGAAAGGG | | | |
| | ATTTATAAACAGATGCCTGGTT | | | |
| | GCTTTAATTTCCTCCGGAAAAA | | | |
| | ACTTTTCTTTAAAACATCAGCTA | | | |
| | GCAGAGCCGAGGGCAGGGGA | | | |
| | AGTCTTCTAACATGCGGGGAC | | | |
| | GTGGAGGAAAATCCCGGGCCC- | | | |
| | tga | | | |
| Linker | GCTAGCAGAGCC | 525 | ASRA | 526 |
| T2A | GAGGGCAGGGGAAGTCTTCTA | 527 | EGRGSLLTCGDVEENP | 528 |
| | ACATGCGGGGACGTGGAGGAA | | GP* | |
| | AATCCCGGGCCC-tga | | | |

pBP0463—pSH1-Fpk-Fpk′.LS.Fpk″.Fpk″′.LS.HA

| | | SEQ ID | | SEQ ID |
|---|---|---|---|---|
| Fragment | Nucleotide | NO: | Peptide | NO: |
| Linker | ATGCTCGAG | 529 | MLE | 530 |
| FRBI | TGGCATGAAGGGTTGGAAGAA | 531 | GVQVETISPGDGRTF | 532 |
| | GCTTCAAGGCTGTACTTCGGA | | PKRGQTCVVHYTGM | |
| | GAGAGGAACGTGAAGGGCAT | | LEDGKKFDSSRDRN | |
| | GTTTGAGGTTCTTGAACCTCT | | KPFKFMLGKQEVIRG | |
| | GCACGCCATGATGGAACGGG | | WEEGVAQMSVGQR | |
| | GACCGCAGACACTGAAAGAAA | | AKLTISPDYAYGATG | |
| | CCTCTTTTAATCAGGCCTACG | | HPPKIPPHATLVFDV | |
| | GCAGAGACCTGATGGAGGCC | | ELLKLE | |
| | CAAGAATGGTGTAGAAAGTAT | | | |
| | ATGAAATCCGGTAACGTGAAA | | | |
| | GACCTGCTCCAGGCCTGGGA | | | |
| | CCTTTATTACCATGTGTTCAG | | | |
| | GCGGATCAGTAAG | | | |
| Linker | TCAGGCGGTGGCTCAGGTGT | 533 | SGGGSGVD | 534 |
| | CGAG | | | |
| Δ- | GTCGACGGATTTGGTGATGTC | 535 | DGFGDVGALESLRG | 536 |
| Caspase9 | GGTGCTCTTGAGAGTTTGAGG | | NADLAYILSMEPCGH | |
| | GGAAATGCAGATTTGGCTTAC | | CLIINNVNFCRESGLR | |
| | ATCCTGAGCATGGAGCCCTGT | | TRTGSNIDCEKLRRR | |
| | GGCCACTGCCTCATTATCAAC | | FSSLHFMVEVKGDLT | |
| | AATGTGAACTTCTGCCGTGAG | | AKKMVLALLELARQD | |
| | TCCGGGCTCCGCACCCGCAC | | HGALDCCVVVILSHG | |
| | TGGCTCCAACATCGACTGTGA | | CQASHLQFPGAVYG | |
| | GAAGTTGCGGCGTCGCTTCTC | | TDGCPVSVEKIVNIFN | |
| | CTCGCTGCATTTCATGGTGGA | | GTSCPSLGGKPKLFF | |
| | GGTGAAGGGCGACCTGACTG | | IQACGGEQKDHGFE | |
| | CCAAGAAAATGGTGCTGGCTT | | VASTSPEDESPGSN | |
| | TGCTGGAGCTGGCGCgGCAG | | PEPDATPFQEGLRTF | |
| | GACCACGGTGCTCTGGACTG | | DQLDAISSLPTPSDIF | |
| | CTGCGTGGTGGTCATTCTCTC | | VSYSTFPGFVSWRD | |
| | TCACGGCTGTCAGGCCAGCC | | PKSGSVVYVETLDDIF | |
| | ACCTGCAGTTCCCAGGGGCT | | EQWAHSEDLQSLLL | |
| | GTCTACGGCACAGATGGATGC | | RVANAVSVKGIYKQM | |
| | CCTGTGTCGGTCGAGAAGATT | | PGCFNFLRKKLFFKT | |
| | GTGAACATCTTCAATGGGACC | | SASRA | |
| | AGCTGCCCCAGCCTGGGAGG | | | |
| | GAAGCCCAAGCTCTTTTTCAT | | | |
| | CCAGGCCTGTGGTGGGGAGC | | | |
| | AGAAAGACCATGGGTTTGAGG | | | |
| | TGGCCTCCACTTCCCCTGAAG | | | |
| | ACGAGTCCCCTGGCAGTAACC | | | |
| | CCGAGCCAGATGCCACCCCG | | | |
| | TTCCAGGAAGGTTTGAGGACC | | | |
| | TTCGACCAGCTGGACGCCATA | | | |
| | TCTAGTTTGCCCACACCCAGT | | | |
| | GACATCTTTGTGTCCTACTCTA | | | |
| | CTTTCCCAGGTTTTGTTTCCTG | | | |
| | GAGGGACCCCAAGAGTGGCT | | | |
| | CCTGGTACGTTGAGACCCTGG | | | |
| | ACGACATCTTTGAGCAGTGGG | | | |
| | CTCACTCTGAAGACCTGCAGT | | | |
| | CCCTCCTGCTTAGGGTCGCTA | | | |
| | ATGCTGTTTCGGTGAAAGGGA | | | |
| | TTTATAAACAGATGCCTGGTT | | | |
| | GCTTTAATTTCCTCCGGAAAA | | | |
| | AACTTTTCTTTAAAACATCAGC | | | |
| | TAGCAGAGCC | | | |
| T2A | GAGGGCAGGGGAAGTCTTCT | 537 | EGRGSLLTCGDVEE | 538 |
| | AACATGCGGGGACGTGGAGG | | NPGP | |
| | AAAATCCCGGGCCCtga | | | |

pBP0725—pSH1-FRBI.FRBI′.LS.FRBI″.FRBI′″

| | | SEQ ID | | SEQ ID |
|---|---|---|---|---|
| Fragment | Nucleotide | NO: | Peptide | NO: |
| FRBI | ATGctcgagTGGCATGAAGGCC | 539 | MLEWHEGLEEASRL | 540 |
| | TGGAAGAGGCATCTCGTTTGT | | YFGERNVKGMFEVL | |
| | ACTTTGGGGAAAGGAACGTGA | | EPLHAMMERGPQTL | |
| | AAGGCATGTTTGAGGTGCTGG | | KETSFNQAYGRDLM | |
| | AGCCCTTGCACGCTATGATGG | | EAQEWCRKYMKSG | |
| | AACGGGGCCCCCAGACTCTG | | NVKDLLQAWDLYYH | |
| | AAGGAAACATCCTTTAATCAG | | VFRRISK | |
| | GCCTATGGTCGAGATTTAATG | | | |
| | GAGGCCCAAGAGTGGTGCAG | | | |
| | GAAGTACATGAAATCAGGGAA | | | |
| | TGTCAAGGACCTCCTCCAAGC | | | |
| | CTGGGACCTCTATTATCATGT | | | |
| | GTTCCGACGAATCTCAAAG | | | |
| Linker | gtcgag | 541 | VD | 542 |
| FRBI′ | TGGCATGAAGGGTTGGAAGAA | 543 | WHEGLEEASRLYFG | 544 |
| | GCTTCAAGGCTGTACTTCGGA | | ERNVKGMFEVLEPL | |
| | GAGAGGAACGTGAAGGGCAT | | HAMMERGPQTLKET | |
| | GTTTGAGGTTCTTGAACCTCT | | SFNQAYGRDLMEAQ | |
| | GCACGCCATGATGGAACGGG | | EWCRKYMKSGNVKD | |
| | GACCGCAGACACTGAAAGAAA | | LLQAWDLYYHVFRRI | |
| | CCTCTTTTAATCAGGCCTACG | | SK | |
| | GCAGAGACCTGATGGAGGCC | | | |
| | CAAGAATGGTGTAGAAAGTAT | | | |
| | ATGAAATCCGGTAACGTGAAA | | | |
| | GACCTGCTCCAGGCCTGGGA | | | |
| | CCTTTATTACCATGTGTTCAG | | | |
| | GCGGATCAGTAAG | | | |
| Linker | TCAGGCGGTGGCTCAGGTGT | 545 | SGGGSGVD | 546 |
| | CGAG | | | |
| FRBI′′ | TGGCATGAAGGCCTGGAAGA | 547 | WHEGLEEASRLYFG | 548 |
| | GGCATCTCGTTTGTACTTTGG | | ERNVKGMFEVLEPL | |
| | GGAAAGGAACGTGAAAGGCA | | HAMMERGPQTLKET | |
| | TGTTTGAGGTGCTGGAGCCCT | | SFNQAYGRDLMEAQ | |
| | TGCACGCTATGATGGAACGG | | EWCRKYMKSGNVKD | |
| | GGCCCCCAGACTCTGAAGGA | | LLQAWDLYYHVFRRI | |
| | AACATCCTTTAATCAGgCCTAT | | SK | |
| | GGTCGAGATTTAATGGAGGCC | | | |
| | CAAGAGTGGtGCAGGAAGTAC | | | |
| | ATGAAATCAGGGAATGTCAAG | | | |
| | GACCTCCTCCAAGCCTGGGA | | | |
| | CCTCTATTATCATGTGTTCCGA | | | |
| | CGAATCTCAAAG | | | |
| Linker | GTCGAC | 549 | VD | 550 |
| FRBI′′′ | TGGCATGAAGGGTTGGAAGAA | 551 | WHEGLEEASRLYFG | 552 |
| | GCTTCAAGGCTGTACTTCGGA | | ERNVKGMFEVLEPL | |
| | GAGAGGAACGTGAAGGGCAT | | HAMMERGPQTLKET | |
| | GTTTGAGGTTCTTGAACCTCT | | SFNQAYGRDLMEAQ | |
| | GCACGCCATGATGGAACGGG | | EWCRKYMKSGNVKD | |
| | GACCGCAGACACTGAAAGAAA | | LLQAWDLYYHVFRRI | |
| | CCTCTTTTAATCAGGCCTACG | | SK | |
| | GCAGAGACCTGATGGAGGCC | | | |
| | CAAGAATGGTGTaGAAAGTAT | | | |
| | ATGAAATCCGGTAACGTGAAA | | | |
| | GACCTGCTCCAGGCCTGGGA | | | |
| | CCTTTATTACCATGTGTTCAG | | | |
| | GCGGATCAGTAAGTCAGGCG | | | |
| | GTGGCTCAGGTGTCGAC | | | |
| Linker | GTCGAC | 553 | VE | 554 |
| HA | TATCCGTACGACGTACCAGAC | 555 | YPYDVPDYALD* | 556 |
| tag | TACGCACTCGACTAA | | | |

pBP0465—pSH1-M-FRBI.FRBI′.LS.HA

| | | SEQ ID | | SEQ ID |
|---|---|---|---|---|
| Fragment | Nucleotide | NO: | Peptide | NO: |
| Myr | atgggctgtgtgcaatgtaaggat | 557 | MGCVQCKDKEATKL | 558 |
| | aaagaagcaacaaaactgacggag | | TEE | |
| | gag | | | |
| Linker | CTCGAG | 559 | LG | 560 |
| FRBI | TGGCATGAAGGCCTGGAAGA | 561 | MLEWHEGLEEASRL | 562 |
| | GGCATCTCGTTTGTACTTTGG | | YFGERNVKGMFEVL | |
| | GGAAAGGAACGTGAAAGGCA | | EPLHAMMERGPQTL | |
| | TGTTTGAGGTGCTGGAGCCCT | | KETSFNQAYGRDLM | |
| | TGCACGCTATGATGGAACGG | | EAQEWCRKYM KSG | |
| | GGCCCCCAGACTCTGAAGGA | | NVKDLLQAWDLYYH | |
| | AACATCCTTTAATCAGGCCTAT | | VFRRISK | |
| | GGTCGAGATTTAATGGAGGCC | | | |
| | CAAGAGTGGTGCAGGAAGTA | | | |
| | CATGAAATCAGGGAATGTCAA | | | |
| | GGACCTCCTCCAAGCCTGGG | | | |
| | ACCTCTATTATCATGTGTTCCG | | | |
| | ACGAATCTCAAAG | | | |
| Linker | gtcgag | 563 | VD | 564 |
| FRBI′ | TGGCATGAAGGGTTGGAAGAA | 565 | WHEGLEEASRLYFG | 566 |
| | GCTTCAAGGCTGTACTTCGGA | | ERNVKGMFEVLEPL | |
| | GAGAGGAACGTGAAGGGCAT | | HAMMERGPQTLKET | |
| | GTTTGAGGTTCTTGAACCTCT | | SFNQAYGRDLMEAQ | |
| | GCACGCCATGATGGAACGGG | | EWCRKYMKSGNVKD | |
| | GACCGCAGACACTGAAAGAAA | | LLQAWDLYYHVFRRI | |
| | CCTCTTTTAATCAGGCCTACG | | SK | |
| | GCAGAGACCTGATGGAGGCC | | | |
| | CAAGAATGGTGTAGAAAGTAT | | | |
| | ATGAAATCCGGTAACGTGAAA | | | |
| | GACCTGCTCCAGGCCTGGGA | | | |
| | CCTTTATTACCATGTGTTCAG | | | |
| | GCGGATCAGTAAG | | | |
| Linker | TCAGGCGGTGGCTCAGGTG | 567 | SGGGSGVD | 568 |
| HA | tatccgtacgacgtaccagacta | 569 | YPYDVPDYALD* | 570 |
| tag | cgcactcgactaa | | | |

pBP0722—pSH1-Fpk-Fpk′.LS.Fpk″.Fpk′″.LS.HA

| | | SEQ ID | | SEQ ID |
|---|---|---|---|---|
| Fragment | Nucleotide | NO: | Peptide | NO: |
| Linker | ATGCTCGAG | 571 | MLE | 572 |
| FKBP | GGcGTcCAaGTcGAaACcATtagt | 573 | GVQVETISPGDGRTF | 574 |
| pk | CCcGGcGAtGGcaGaACaTTtCCt | | PKRGQTCVVHYTGM | |
| | AAaaGgGGaCAaACaTGtGTcGT | | LEDGKKFDSSRDRN | |
| | cCAtTAtACaGGcATGtTgGAgGA | | KPFKFMLGKQEVIRG | |
| | cGGcAAaAAgttcGAcagtagtaGaG | | WEEGVAQMSVGQR | |
| | AtcGcAAtAAaCCtTTcAAaTTcAT | | AKLTISPDYAYGATG | |
| | GtTgGGaAAaCAaGAaGTcATta | | HPPKIPPHATLVFDV | |
| | GgGGaTGGGAgGAgGGcGTgG | | ELLKLE | |
| | CtCAaATGtccGTcGGcCAacGcG | | | |
| | CtAAgCTcACcATcagcCCcGAcT | | | |
| | AcGCaTAcGGcGCtACcGGaCAt | | | |
| | CCccctaagATtCCcCCtCAcGCtA | | | |
| | CctTgGTgTTtGAcGTcGAaCTgtT | | | |
| | gAAgCTcGAa | | | |
| Linker | gtcgag | 575 | VD | 576 |
| FKBP | ggagtgcaggtggagactatctccccagg | 577 | GVQVETISPGDGRTF | 578 |
| pk′ | agacgggcgcaccttccccaagcgcggcc | | PKRGQTCVVHYTGM | |
| | agacctgcgtggtgcactacaccgggatgc | | LEDGKKFDSSRDRN | |
| | ttgaagatggaaagaaattcgattcctctcg | | KPFKFMLGKQEVIRG | |
| | ggacagaaacaagccctttaagtttatgcta | | WE EGVAQMSVGQR | |
| | ggcaagcaggaggtgatccgaggctggg | | AKLTISPDYAYGATG | |
| | aagaaggggttgcccagatgagtgtgggtc | | HPPKIPPHATLVFDV | |
| | agagagccaaactgactatatctccagatt | | ELLKLE | |
| | atgcctatggtgccactgggcacccaccta | | | |
| | agatcccaccacatgccactctcgtcttcgat | | | |
| | gtggagcttctaaaactggaa | | | |
| Linker | TCAGGCGGTGGCTCAGGTGT | 579 | SGGGSGVD | 580 |
| | CGAG | | | |
| FKBP | GGcGTcCAaGTcGAaACcATtagt | 581 | GVQVETISPGDGRTF | 582 |
| pk′′ | CCcGGcGAtGGcaGaACaTTtCCt | | PKRGQTCVVHYTGM | |
| | AAaaGgGGaCAaACaTGtGTcGT | | LEDGKKFDSSRDRN | |
| | cCAtTAtACaGGcATGtTgGAgGA | | KPFKFMLGKQEVIRG | |
| | cGGcAAaAAgttcGAcagtagtaGaG | | WEEGVAQMSVGQR | |
| | AtcGcAAtAAaCCtTTcAAaTTcAT | | AKLTISPDYAYGATG | |
| | GtTgGGaAAaCAaGAaGTcATta | | HPPKIPPHATLVFDV | |
| | GgGGaTGGGAgGAgGGcGTgG | | ELLKLE | |
| | CtCAaATGtccGTcGGcCAacGcG | | | |
| | CtAAgCTcACcATcagcCCcGAcT | | | |
| | AcGCaTAcGGcGCtACcGGaCAt | | | |
| | CCccctaagATtCCcCCtCAcGCtA | | | |
| | CctTgGTgTTtGAcGTcGAaCTgtT | | | |
| | gAAgCTcGAa | | | |
| Linker | GTCGAC | 583 | VD | 584 |
| FKBP | ggagtgcaggtggagactatctccccagg | 585 | GVQVETISPGDGRTF | 586 |
| pk′′′ | agacgggcgcaccttccccaagcgcggcc | | PKRGQTCVVHYTGM | |
| | agacctgcgtggtgcactacaccgggatgc | | LEDGKKFDSSRDRN | |
| | ttgaagatggaaagaaattcgattcctctcg | | KPFKFMLGKQEVIRG | |
| | ggacagaaacaagccctttaagtttatgcta | | WEEGVAQMSVGQR | |
| | ggcaagcaggaggtgatccgaggctggg | | AKLTISPDYAYGATG | |
| | aagaagttgcccagatgagtgtgtc | | HPPKIPPHATLVFDV | |
| | agagagccaaactgactatatctccagatt | | ELLKLE | |
| | atgcctatggtgccactgggcacccaccta | | | |
| | agatcccaccacatgccactctcgtcttcgat | | | |
| | gtggagcttctaaaactggaa | | | |
| Linker | TCAGGCGGTGGCTCAGGTGT | 587 | SGGGSGVD | 588 |
| | CGAG | | | |
| HA | TATCCGTACGACGTACCAGAC | 589 | YPYDVPDYALD* | 590 |
| tag | TACGCACTCGACTAA | | | |

pBP0220—pSFG-iC9.T2A-ΔCD19

| | | SEQ ID | | SEQ ID |
|---|---|---|---|---|
| Fragment | Nucleotide | NO: | Peptide | NO: |
| FKBP | ATGCTCGAGGGAGTGCAGGTG | 591 | MLEGVQVETISPGDG | 592 |
| 12v36 | GAGACTATCTCCCCAGGAGAC | | RTFPKRGQTCVVHY | |
| | GGGCGCACCTTCCCCAAGCGC | | TGMLEDGKKVDSSR | |
| | GGCCAGACCTGCGTGGTGCAC | | DRNKPFKFMLGKQE | |
| | TACACCGGGATGCTTGAAGAT | | VIRGWEEGVAQMSV | |
| | GGAAAGAAAGTTGATTCCTCCC | | GQRAKLTISPDYAYG | |
| | GGGACAGAAACAAGCCCTTTAA | | ATGHPGIIPPHATLVF | |
| | GTTTATGCTAGGCAAGCAGGA | | DVELLKLE | |
| | GGTGATCCGAGGCTGGGAAGA | | | |
| | AGGGGTTGCCCAGATGAGTGT | | | |
| | GGGTCAGAGAGCCAAACTGAC | | | |
| | TATATCTCCAGATTATGCCTAT | | | |
| | GGTGCCACTGGGCACCCAGGC | | | |
| | ATCATCCCACCACATGCCACTC | | | |
| | TCGTCTTCGATGTGGAGCTTCT | | | |
| | AAAACTGGAA | | | |
| Linker | TCTGGCGGTGGATCCGGA | 593 | SGGGSG | 594 |
| Δ | GTCGACGGATTTGGTGATGTC | 595 | VDGFGDVGALESLR | 596 |
| Caspase9 | GGTGCTCTTGAGAGTTTGAGG | | GNADLAYILSMEPCG | |
| | GGAAATGCAGATTTGGCTTACA | | HCLIINNVNFCRESGL | |
| | TCCTGAGCATGGAGCCCTGTG | | RTRTGSNIDCEKLRR | |
| | GCCACTGCCTCATTATCAACAA | | RFSSLHFMVEVKGDL | |
| | TGTGAACTTCTGCCGTGAGTCC | | TAKKMVLALLELARQ | |
| | GGGCTCCGCACCCGCACTGGC | | DHGALDCCVVVILSH | |
| | TCCAACATCGACTGTGAGAAGT | | GCQASHLQFPGAVY | |
| | TGCGGCGTCGCTTCTCCTCGC | | GTDGCPVSVEKIVNI | |
| | TGCATTTCATGGTGGAGGTGAA | | FNGTSCPSLGGKPKL | |
| | GGGCGACCTGACTGCCAAGAA | | FFIQACGGEQKDHG | |
| | AATGGTGCTGGCTTTGCTGGA | | FEVASTSPEDESPGS | |
| | GCTGGCGCGGCAGGACCACG | | NPEPDATPFQEGLRT | |
| | GTGCTCTGGACTGCTGCGTGG | | FDQLDAISSLPTPSDI | |
| | TGGTCATTCTCTCTCACGGCTG | | FVSYSTFPGFVSWR | |
| | TCAGGCCAGCCACCTGCAGTT | | DPKSGSWYVETLDDI | |
| | CCCAGGGGCTGTCTACGGCAC | | FEQWAHSEDLQSLLL | |
| | AGATGGATGCCCTGTGTCGGT | | RVANAVSVKGIYKQM | |
| | CGAGAAGATTGTGAACATCTTC | | PGCFNFLRKKLFFKT | |
| | AATGGGACCAGCTGCCCCAGC | | SASRA | |
| | CTGGGAGGGAAGCCCAAGCTC | | | |
| | TTTTTCATCCAGGCCTGTGGTG | | | |
| | GGGAGCAGAAAGACCATGGGT | | | |
| | TTGAGGTGGCCTCCACTTCCC | | | |
| | CTGAAGACGAGTCCCCTGGCA | | | |
| | GTAACCCCGAGCCAGATGCCA | | | |
| | CCCCGTTCCAGGAAGGTTTGA | | | |
| | GGACCTTCGACCAGCTGGACG | | | |
| | CCATATCTAGTTTGCCCACACC | | | |
| | CAGTGACATCTTTGTGTCCTAC | | | |
| | TCTACTTTCCCAGGTTTTGTTTC | | | |
| | CTGGAGGGACCCCAAGAGTGG | | | |
| | CTCCTGGTACGTTGAGACCCT | | | |
| | GGACGACATCTTTGAGCAGTG | | | |
| | GGCTCACTCTGAAGACCTGCA | | | |
| | GTCCCTCCTGCTTAGGGTCGC | | | |
| | TAATGCTGTTTCGGTGAAAGGG | | | |
| | ATTTATAAACAGATGCCTGGTT | | | |
| | GCTTTAATTTCCTCCGGAAAAA | | | |
| | ACTTTTCTTTAAAACATCAGCTA | | | |
| | GCAGAGCC | | | |
| T2A | GAGGGCAGGGGAAGTCTTCTA | 597 | EGRGSLLTCGDVEE | 598 |
| | ACATGCGGGGACGTGGAGGAA | | NPGP | |
| | AATCCCGGGCCC | | | |
| ΔCD19 | ATGCCACCTCCTCGCCTCCTCT | 599 | MPPPRLLFFLLFLTP | 600 |
| | TCTTCCTCCTCTTCCTCACCCC | | MEVRPEEPLVVKVEE | |
| | CATGGAAGTCAGGCCCGAGGA | | GDNAVLQCLKGTSD | |
| | ACCTCTAGTGGTGAAGGTGGA | | GPTQQLTWSRESPL | |
| | AGAGGGAGATAACGCTGTGCT | | KPFLKLSLGLPGLGIH | |
| | GCAGTGCCTCAAGGGGACCTC | | MRPLAIWLFIFNVSQ | |
| | AGATGGCCCCACTCAGCAGCT | | QMGGFYLCQPGPPS | |
| | GACCTGGTCTCGGGAGTCCCC | | EKAWQPGVVTVNVE | |
| | GCTTAAACCCTTCTTAAAACTC | | GSGELFRWNVSDLG | |
| | AGCCTGGGGCTGCCAGGCCTG | | GLGCGLKNRSSEGP | |
| | GGAATCCACATGAGGCCCCTG | | SSPSGKLMSPKLYV | |
| | GCCATCTGGCTTTTCATCTTCA | | WAKDRPEIWEGEPP | |
| | ACGTCTCTCAACAGATGGGGG | | CLPPRDSLNQSLSQ | |
| | GCTTCTACCTGTGCCAGCCGG | | DLTMAPGSTLWLSC | |
| | GGCCCCCCTCTGAGAAGGCCT | | GVPPDSVSRGPLSW | |
| | GGCAGCCTGGCTGGACAGTCA | | THVHPKGPKSLLSLE | |
| | ATGTGGAGGGCAGCGGGGAG | | LKDDRPARDMVVVME | |
| | CTGTTCCGGTGGAATGTTTCGG | | TGLLLPRATAQDAGK | |
| | ACCTAGGTGGCCTGGGCTGTG | | YYCHRGNLTMSFHL | |
| | GCCTGAAGAACAGGTCCTCAG | | EITARPVLWHWLLRT | |
| | AGGGCCCCAGCTCCCCTTCCG | | GGWKVSAVTLAYLIF | |
| | GGAAGCTCATGAGCCCCAAGC | | CLCSLVGILHLQRAL | |
| | TGTATGTGTGGGCCAAAGACC | | VLRRKRKRMTDPTR | |
| | GCCCTGAGATCTGGGAGGGAG | | RF* | |
| | AGCCTCCGTGTCTCCCACCGA | | | |
| | GGGACAGCCTGAACCAGAGCC | | | |
| | TCAGCCAGGACCTCACCATGG | | | |
| | CCCCTGGCTCCACACTCTGGC | | | |
| | TGTCCTGTGGGGTACCCCCTG | | | |
| | ACTCTGTGTCCAGGGGCCCCC | | | |
| | TCTCCTGGACCCATGTGCACC | | | |
| | CCAAGGGGCCTAAGTCATTGC | | | |
| | TGAGCCTAGAGCTGAAGGACG | | | |
| | ATCGCCCGGCCAGAGATATGT | | | |
| | GGGTAATGGAGACGGGTCTGT | | | |
| | TGTTGCCCCGGGCCACAGCTC | | | |
| | AAGACGCTGGAAAGTATTATTG | | | |
| | TCACCGTGGCAACCTGACCAT | | | |
| | GTCATTCCACCTGGAGATCACT | | | |
| | GCTCGGCCAGTACTATGGCAC | | | |
| | TGGCTGCTGAGGACTGGTGGC | | | |
| | TGGAAGGTCTCAGCTGTGACTT | | | |
| | TGGCTTATCTGATCTTCTGCCT | | | |
| | GTGTTCCCTTGTGGGCATTCTT | | | |
| | CATCTTCAAAGAGCCCTGGTCC | | | |
| | TGAGGAGGAAAAGAAAGCGAA | | | |
| | TGACTGACCCCACCAGGAGAT | | | |
| | TCTAA | | | |

pBP0756—pSFG-iC9.T2A-dCD19.P2A-FRB_{I}

| | | SEQ ID | | SEQ ID |
|---|---|---|---|---|
| Fragment | Nucleotide | NO: | Peptide | NO: |
| FKBP | ATGCTCGAGGGAGTGCAGGTG | 601 | MLEGVQVETISPGDG | 602 |
| 12v36 | GAGACTATCTCCCCAGGAGAC | | RTFPKRGQTCVVHY | |
| | GGGCGCACCTTCCCCAAGCGC | | TGMLEDGKKVDSSR | |
| | GGCCAGACCTGCGTGGTGCAC | | DRNKPFKFMLGKQE | |
| | TACACCGGGATGCTTGAAGAT | | VIRGWEEGVAQMSV | |
| | GGAAAGAAAGTTGATTCCTCCC | | GQRAKLTISPDYAYG | |
| | GGGACAGAAACAAGCCCTTTAA | | ATGHPGIIPPHATLVF | |
| | GTTTATGCTAGGCAAGCAGGA | | DVELLKLE | |
| | GGTGATCCGAGGCTGGGAAGA | | | |
| | AGGGGTTGCCCAGATGAGTGT | | | |
| | GGGTCAGAGAGCCAAACTGAC | | | |
| | TATATCTCCAGATTATGCCTAT | | | |
| | GGTGCCACTGGGCACCCAGGC | | | |
| | ATCATCCCACCACATGCCACTC | | | |
| | TCGTCTTCGATGTGGAGCTTCT | | | |
| | AAAACTGGAA | | | |
| Linker | TCTGGCGGTGGATCCGGA | 603 | SGGGSG | 604 |
| Δ | GTCGACGGATTTGGTGATGTC | 605 | VDGFGDVGALESLR | 606 |
| Caspase9 | GGTGCTCTTGAGAGTTTGAGG | | GNADLAYILSMEPCG | |
| | GGAAATGCAGATTTGGCTTACA | | HCLIINNVNFCRESGL | |
| | TCCTGAGCATGGAGCCCTGTG | | RTRTGSNIDCEKLRR | |
| | GCCACTGCCTCATTATCAACAA | | RFSSLHFMVEVKGDL | |
| | TGTGAACTTCTGCCGTGAGTCC | | TAKKMVLALLELARQ | |
| | GGGCTCCGCACCCGCACTGGC | | DHGALDCCVVVILSH | |
| | TCCAACATCGACTGTGAGAAGT | | GCQASHLQFPGAVY | |
| | TGCGGCGTCGCTTCTCCTCGC | | GTDGCPVSVEKIVNI | |
| | TGCATTTCATGGTGGAGGTGAA | | FNGTSCPSLGGKPKL | |
| | GGGCGACCTGACTGCCAAGAA | | FFIQACGGEQKDHG | |
| | AATGGTGCTGGCTTTGCTGGA | | FEVASTSPEDESPGS | |
| | GCTGGCGCGGCAGGACCACG | | NPEPDATPFQEGLRT | |
| | GTGCTCTGGACTGCTGCGTGG | | FDQLDAISSLPTPSDI | |
| | TGGTCATTCTCTCTCACGGCTG | | FVSYSTFPGFVSWR | |
| | TCAGGCCAGCCACCTGCAGTT | | DPKSGSWYVETLDDI | |
| | CCCAGGGGCTGTCTACGGCAC | | FEQWAHSEDLQSLLL | |
| | AGATGGATGCCCTGTGTCGGT | | RVANAVSVKGIYKQM | |
| | CGAGAAGATTGTGAACATCTTC | | PGCFNFLRKKLFFKT | |
| | AATGGGACCAGCTGCCCCAGC | | SASRA | |
| | CTGGGAGGGAAGCCCAAGCTC | | | |
| | TTTTTCATCCAGGCCTGTGGTG | | | |
| | GGGAGCAGAAAGACCATGGGT | | | |
| | TTGAGGTGGCCTCCACTTCCC | | | |
| | CTGAAGACGAGTCCCCTGGCA | | | |
| | GTAACCCCGAGCCAGATGCCA | | | |
| | CCCCGTTCCAGGAAGGTTTGA | | | |
| | GGACCTTCGACCAGCTGGACG | | | |
| | CCATATCTAGTTTGCCCACACC | | | |
| | CAGTGACATCTTTGTGTCCTAC | | | |
| | TCTACTTTCCCAGGTTTTGTTTC | | | |
| | CTGGAGGGACCCCAAGAGTGG | | | |
| | CTCCTGGTACGTTGAGACCCT | | | |
| | GGACGACATCTTTGAGCAGTG | | | |
| | GGCTCACTCTGAAGACCTGCA | | | |
| | GTCCCTCCTGCTTAGGGTCGC | | | |
| | TAATGCTGTTTCGGTGAAAGGG | | | |
| | ATTTATAAACAGATGCCTGGTT | | | |
| | GCTTTAATTTCCTCCGGAAAAA | | | |
| | ACTTTTCTTTAAAACATCAGCTA | | | |
| | GCAGAGCC | | | |
| T2A | GAGGGCAGGGGAAGTCTTCTA | 607 | EGRGSLLTCGDVEE | 608 |
| | ACATGCGGGGACGTGGAGGAA | | NPGP | |
| | AATCCCGGGCCC | | | |
| ΔCD19 | ATGCCACCTCCTCGCCTCCTCT | 609 | MPPPRLLFFLLFLTP | 610 |
| | TCTTCCTCCTCTTCCTCACCCC | | MEVRPEEPLVVKVEE | |
| | CATGGAAGTCAGGCCCGAGGA | | GDNAVLQCLKGTSD | |
| | ACCTCTAGTGGTGAAGGTGGA | | GPTQQLTWSRESPL | |
| | AGAGGGAGATAACGCTGTGCT | | KPFLKLSLGLPGLGIH | |
| | GCAGTGCCTCAAGGGGACCTC | | MRPLAIWLFIFNVSQ | |
| | AGATGGCCCCACTCAGCAGCT | | QMGGFYLCQPGPPS | |
| | GACCTGGTCTCGGGAGTCCCC | | EKAWQPGVVTVNVE | |
| | GCTTAAACCCTTCTTAAAACTC | | GSGELFRWNVSDLG | |
| | AGCCTGGGGCTGCCAGGCCTG | | GLGCGLKNRSSEGP | |
| | GGAATCCACATGAGGCCCCTG | | SSPSGKLMSPKLYV | |
| | GCCATCTGGCTTTTCATCTTCA | | WAKDRPEIWEGEPP | |
| | ACGTCTCTCAACAGATGGGGG | | CLPPRDSLNQSLSQ | |
| | GCTTCTACCTGTGCCAGCCGG | | DLTMAPGSTLWLSC | |
| | GGCCCCCCTCTGAGAAGGCCT | | GVPPDSVSRGPLSW | |
| | GGCAGCCTGGCTGGACAGTCA | | THVHPKGPKSLLSLE | |
| | ATGTGGAGGGCAGCGGGGAG | | LKDDRPARDMVVVME | |
| | CTGTTCCGGTGGAATGTTTCGG | | TGLLLPRATAQDAGK | |
| | ACCTAGGTGGCCTGGGCTGTG | | YYCHRGNLTMSFHL | |
| | GCCTGAAGAACAGGTCCTCAG | | EITARPVLWHWLLRT | |
| | AGGGCCCCAGCTCCCCTTCCG | | GGWKVSAVTLAYLIF | |
| | GGAAGCTCATGAGCCCCAAGC | | CLCSLVGILHLQRAL | |
| | TGTATGTGTGGGCCAAAGACC | | VLRRKRKRMTDPTR | |
| | GCCCTGAGATCTGGGAGGGAG | | RF | |
| | AGCCTCCGTGTCTCCCACCGA | | | |
| | GGGACAGCCTGAACCAGAGCC | | | |
| | TCAGCCAGGACCTCACCATGG | | | |
| | CCCCTGGCTCCACACTCTGGC | | | |
| | TGTCCTGTGGGGTACCCCCTG | | | |
| | ACTCTGTGTCCAGGGGCCCCC | | | |
| | TCTCCTGGACCCATGTGCACC | | | |
| | CCAAGGGGCCTAAGTCATTGC | | | |
| | TGAGCCTAGAGCTGAAGGACG | | | |
| | ATCGCCCGGCCAGAGATATGT | | | |
| | GGGTAATGGAGACGGGTCTGT | | | |
| | TGTTGCCCCGGGCCACAGCTC | | | |
| | AAGACGCTGGAAAGTATTATTG | | | |
| | TCACCGTGGCAACCTGACCAT | | | |
| | GTCATTCCACCTGGAGATCACT | | | |
| | GCTCGGCCAGTACTATGGCAC | | | |
| | TGGCTGCTGAGGACTGGTGGC | | | |
| | TGGAAGGTCTCAGCTGTGACTT | | | |
| | TGGCTTATCTGATCTTCTGCCT | | | |
| | GTGTTCCCTTGTGGGCATTCTT | | | |
| | CATCTTCAAAGAGCCCTGGTCC | | | |
| | TGAGGAGGAAAAGAAAGCGAA | | | |
| | TGACTGACCCCACCAGGAGAT | | | |
| | TC | | | |
| GSG- | GGGAGTGGG | 611 | GSG | 612 |
| linker | | | | |
| P2A | GCTACGAATTTTAGCTTGCTGA | 613 | ATNFSLLKQAGDVEE | 614 |
| | AGCAGGCCGGTGATGTGGAAG | | NPGP | |
| | AGAACCCCGGGCCT | | | |
| FRBI | TGGCACGAAGGTTTGGAAGAG | 615 | WHEGLEEASRLYFG | 616 |
| | GCCTCCCGCCTGTATTTCGGT | | ERNVKGMFEVLEPL | |
| | GAGAGAAATGTCAAAGGTATGT | | HAMMERGPQTLKET | |
| | TTGAAGTGCTTGAGCCCCTGCA | | SFNQAYGRDLMEAQ | |
| | CGCCATGATGGAACGGGGGCC | | EWCRKYMKSGNVKD | |
| | GCAGACTCTGAAAGAAACCTCA | | LLQAWDLYYHVFRRI | |
| | TTCAACCAGGCATACGGGCGA | | SK* | |
| | GACCTGATGGAAGCGCAGGAA | | | |
| | TGGTGTAGGAAGTACATGAAGT | | | |
| | CCGGAAATGTGAAGGACTTGC | | | |
| | TCCAGGCTTGGGACCTGTACTA | | | |
| | TCACGTATTTCGGAGAATAAGC | | | |
| | AAG-TAA | | | |

pBP0755—pSFG-iC9.T2A-dCD19.P2A-FRB_{I}2

| | | SEQ ID | | SEQ ID |
|---|---|---|---|---|
| Fragment | Nucleotide | NO: | Peptide | NO: |
| FKBP | ATGCTCGAGGGAGTGCAGGTG | 617 | MLEGVQVETISPGD | 618 |
| 12v36 | GAGACTATCTCCCCAGGAGAC | | GRTFPKRGQTCVVH | |
| | GGGCGCACCTTCCCCAAGCGC | | YTGMLEDGKKVDSS | |
| | GGCCAGACCTGCGTGGTGCAC | | RDRNKPFKFMLGKQ | |
| | TACACCGGGATGCTTGAAGAT | | EVIRGWEEGVAQM | |
| | GGAAAGAAAGTTGATTCCTCCC | | SVGQRAKLTISPDY | |
| | GGGACAGAAACAAGCCCTTTAA | | AYGATGHPGIIPPHA | |
| | GTTTATGCTAGGCAAGCAGGA | | TLVFDVELLKLE | |
| | GGTGATCCGAGGCTGGGAAGA | | | |
| | AGGGGTTGCCCAGATGAGTGT | | | |
| | GGGTCAGAGAGCCAAACTGAC | | | |
| | TATATCTCCAGATTATGCCTAT | | | |
| | GGTGCCACTGGGCACCCAGGC | | | |
| | ATCATCCCACCACATGCCACTC | | | |
| | TCGTCTTCGATGTGGAGCTTCT | | | |
| | AAAACTGGAA | | | |
| Linker | TCTGGCGGTGGATCCGGA | 619 | SGGGSG | 620 |
| Δ | GTCGACGGATTTGGTGATGTC | 621 | VDGFGDVGALESLR | 622 |
| Caspase9 | GGTGCTCTTGAGAGTTTGAGG | | GNADLAYILSMEPC | |
| | GGAAATGCAGATTTGGCTTACA | | GHCLIINNVNFCRES | |
| | TCCTGAGCATGGAGCCCTGTG | | GLRTRTGSNIDCEK | |
| | GCCACTGCCTCATTATCAACAA | | LRRRFSSLHFMVEV | |
| | TGTGAACTTCTGCCGTGAGTCC | | KGDLTAKKMVLALL | |
| | GGGCTCCGCACCCGCACTGGC | | ELARQDHGALDCCV | |
| | TCCAACATCGACTGTGAGAAGT | | VVILSHGCQASHLQ | |
| | TGCGGCGTCGCTTCTCCTCGC | | FPGAVYGTDGCPVS | |
| | TGCATTTCATGGTGGAGGTGAA | | VEKIVNIFNGTSCPS | |
| | GGGCGACCTGACTGCCAAGAA | | LGGKPKLFFIQACG | |
| | AATGGTGCTGGCTTTGCTGGA | | GEQKDHGFEVASTS | |
| | GCTGGCGCGGCAGGACCACG | | PEDESPGSNPEPDA | |
| | GTGCTCTGGACTGCTGCGTGG | | TPFQEGLRTFDQLD | |
| | TGGTCATTCTCTCTCACGGCTG | | AISSLPTPSDIFVSYS | |
| | TCAGGCCAGCCACCTGCAGTT | | TFPGFVSWRDPKS | |
| | CCCAGGGGCTGTCTACGGCAC | | GSVVYVETLDDIFEQ | |
| | AGATGGATGCCCTGTGTCGGT | | WAHSEDLQSLLLRV | |
| | CGAGAAGATTGTGAACATCTTC | | ANAVSVKGIYKQMP | |
| | AATGGGACCAGCTGCCCCAGC | | GCFNFLRKKLFFKT | |
| | CTGGGAGGGAAGCCCAAGCTC | | SASRA | |
| | TTTTTCATCCAGGCCTGTGGTG | | | |
| | GGGAGCAGAAAGACCATGGGT | | | |
| | TTGAGGTGGCCTCCACTTCCC | | | |
| | CTGAAGACGAGTCCCCTGGCA | | | |
| | GTAACCCCGAGCCAGATGCCA | | | |
| | CCCCGTTCCAGGAAGGTTTGA | | | |
| | GGACCTTCGACCAGCTGGACG | | | |
| | CCATATCTAGTTTGCCCACACC | | | |
| | CAGTGACATCTTTGTGTCCTAC | | | |
| | TCTACTTTCCCAGGTTTTGTTTC | | | |
| | CTGGAGGGACCCCAAGAGTGG | | | |
| | CTCCTGGTACGTTGAGACCCT | | | |
| | GGACGACATCTTTGAGCAGTG | | | |
| | GGCTCACTCTGAAGACCTGCA | | | |
| | GTCCCTCCTGCTTAGGGTCGC | | | |
| | TAATGCTGTTTCGGTGAAAGGG | | | |
| | ATTTATAAACAGATGCCTGGTT | | | |
| | GCTTTAATTTCCTCCGGAAAAA | | | |
| | ACTTTTCTTTAAAACATCAGCTA | | | |
| | GCAGAGCC | | | |
| T2A | GAGGGCAGGGGAAGTCTTCTA | 623 | EGRGSLLTCGDVEE | 624 |
| | ACATGCGGGGACGTGGAGGAA | | NPGP | |
| | AATCCCGGGCCC | | | |
| ΔCD19 | ATGCCACCTCCTCGCCTCCTCT | 625 | MPPPRLLFFLLFLTP | 626 |
| | TCTTCCTCCTCTTCCTCACCCC | | MEVRPEEPLVVKVE | |
| | CATGGAAGTCAGGCCCGAGGA | | EGDNAVLQCLKGTS | |
| | ACCTCTAGTGGTGAAGGTGGA | | DGPTQQLTWSRES | |
| | AGAGGGAGATAACGCTGTGCT | | PLKPFLKLSLGLPGL | |
| | GCAGTGCCTCAAGGGGACCTC | | GIHMRPLAIWLFIFN | |
| | AGATGGCCCCACTCAGCAGCT | | VSQQMGGFYLCQP | |
| | GACCTGGTCTCGGGAGTCCCC | | GPPSEKAWQPGVVT | |
| | GCTTAAACCCTTCTTAAAACTC | | VNVEGSGELFRWN | |
| | AGCCTGGGGCTGCCAGGCCTG | | VSDLGGLGCGLKNR | |
| | GGAATCCACATGAGGCCCCTG | | SSEGPSSPSGKLMS | |
| | GCCATCTGGCTTTTCATCTTCA | | PKLYVWAKDRPEIW | |
| | ACGTCTCTCAACAGATGGGGG | | EGEPPCLPPRDSLN | |
| | GCTTCTACCTGTGCCAGCCGG | | QSLSQDLTMAPGST | |
| | GGCCCCCCTCTGAGAAGGCCT | | LWLSCGVPPDSVSR | |
| | GGCAGCCTGGCTGGACAGTCA | | GPLSVVTHVHPKGP | |
| | ATGTGGAGGGCAGCGGGGAG | | KSLLSLELKDDRPA | |
| | CTGTTCCGGTGGAATGTTTCG | | GRDMVVVMETGLLLP | |
| | ACCTAGGTGGCCTGGGCTGTG | | RATAQDAGKYYCH | |
| | GCCTGAAGAACAGGTCCTCAG | | RGNLTMSFHLEITAR | |
| | AGGGCCCCAGCTCCCCTTCCG | | PVLWHWLLRTGGW | |
| | GGAAGCTCATGAGCCCCAAGC | | KVSAVTLAYLIFCLC | |
| | TGTATGTGTGGGCCAAAGACC | | SLVGILHLQRALVLR | |
| | GCCCTGAGATCTGGGAGGGAG | | RKRKRMTDPTRRF | |
| | AGCCTCCGTGTCTCCCACCGA | | | |
| | GGGACAGCCTGAACCAGAGCC | | | |
| | TCAGCCAGGACCTCACCATGG | | | |
| | CCCCTGGCTCCACACTCTGGC | | | |
| | TGTCCTGTGGGGTACCCCCTG | | | |
| | ACTCTGTGTCCAGGGGCCCCC | | | |
| | TCTCCTGGACCCATGTGCACC | | | |
| | CCAAGGGGCCTAAGTCATTGC | | | |
| | TGAGCCTAGAGCTGAAGGACG | | | |
| | ATCGCCCGGCCAGAGATATGT | | | |
| | GGGTAATGGAGACGGGTCTGT | | | |
| | TGTTGCCCCGGGCCACAGCTC | | | |
| | AAGACGCTGGAAAGTATTATTG | | | |
| | TCACCGTGGCAACCTGACCAT | | | |
| | GTCATTCCACCTGGAGATCACT | | | |
| | GCTCGGCCAGTACTATGGCAC | | | |
| | TGGCTGCTGAGGACTGGTGGC | | | |
| | TGGAAGGTCTCAGCTGTGACTT | | | |
| | TGGCTTATCTGATCTTCTGCCT | | | |
| | GTGTTCCCTTGTGGGCATTCTT | | | |
| | CATCTTCAAAGAGCCCTGGTCC | | | |
| | TGAGGAGGAAAAGAAAGCGAA | | | |
| | TGACTGACCCCACCAGGAGAT | | | |
| | TC | | | |
| GSG- | GGGAGTGGG | 627 | GSG | 628 |
| linker | | | | |
| P2A | GCTACGAATTTTAGCTTGCTGA | 629 | ATNFSLLKQAGDVE | 630 |
| | AGCAGGCCGGTGATGTGGAAG | | ENPGP | |
| | AGAACCCCGGGCCT | | | |
| FRBI | TGGCATGAAGGTCTGGAAGAA | 631 | WHEGLEEASRLYFG | 632 |
| | GCTTCTCGCCTTTATTTTGGCG | | ERNVKGMFEVLEPL | |
| | AACGGAACGTAAAAGGTATGTT | | HAMMERGPQTLKE | |
| | TGAAGTCCTGGAGCCATTGCA | | TSFNQAYGRDLMEA | |
| | CGCCATGATGGAGCGCGGGCC | | QEWCRKYMKSGNV | |
| | TCAGACCCTCAAGGAAACCAGT | | KDLLQAWDLYYHVF | |
| | TTTAATCAGGCCTATGGGCGAG | | RRISK | |
| | ACCTCATGGAGGCACAGGAAT | | | |
| | GGTGTCGGAAGTATATGAAGTC | | | |
| | CGGCAACGTTAAGGATCTCTTG | | | |
| | CAGGCCTGGGACTTGTATTATC | | | |
| | ACGTGTTCCGGCGAATCAGCA | | | |
| | AG | | | |
| Linker | Cgtacg | 633 | RT | 634 |
| FRBI′′ | TGGCACGAAGGTTTGGAAGAG | 635 | WHEGLEEASRLYFG | 636 |
| | GCCTCCCGCCTGTATTTCGGT | | ERNVKGMFEVLEPL | |
| | GAGAGAAATGTCAAAGGTATGT | | HAMMERGPQTLKE | |
| | TTGAAGTGCTTGAGCCCCTGCA | | TSFNQAYGRDLMEA | |
| | CGCCATGATGGAACGGGGGCC | | QEWCRKYMKSGNV | |
| | GCAGACTCTGAAAGAAACCTCA | | KDLLQAWDLYYHVF | |
| | TTCAACCAGGCATACGGGCGA | | RRISK* | |
| | GACCTGATGGAAGCGCAGGAA | | | |
| | TGGTGTAGGAAGTACATGAAGT | | | |
| | CCGGAAATGTGAAGGACTTGC | | | |
| | TCCAGGCTTGGGACCTGTACTA | | | |
| | TCACGTATTTCGGAGAATAAGC | | | |
| | AAG-TAA | | | |

pBP0757—pSFG-iC9.T2A-dCD19.P2A-FRB_{I}3

| | | SEQ ID | | SEQ ID |
|---|---|---|---|---|
| Fragment | Nucleotide | NO: | Peptide | NO: |
| FKBP | ATGCTCGAGGGAGTGCAGGT | 637 | MLEGVQVETISPGD | 638 |
| 12v36 | GGAGACTATCTCCCCAGGAGA | | GRTFPKRGQTCVVH | |
| | CGGGCGCACCTTCCCCAAGC | | YTGMLEDGKKVDSS | |
| | GCGGCCAGACCTGCGTGGTG | | RDRNKPFKFMLGKQ | |
| | CACTACACCGGGATGCTTGAA | | EVIRGWEEGVAQM | |
| | GATGGAAAGAAAGTTGATTCC | | SVGQRAKLTISPDY | |
| | TCCCGGGACAGAAACAAGCC | | AYGATGHPGIIPPHA | |
| | CTTTAAGTTTATGCTAGGCAA | | TLVFDVELLKLE | |
| | GCAGGAGGTGATCCGAGGCT | | | |
| | GGGAAGAAGGGGTTGCCCAG | | | |
| | ATGAGTGTGGGTCAGAGAGC | | | |
| | CAAACTGACTATATCTCCAGA | | | |
| | TTATGCCTATGGTGCCACTGG | | | |
| | GCACCCAGGCATCATCCCACC | | | |
| | ACATGCCACTCTCGTCTTCGA | | | |
| | TGTGGAGCTTCTAAAACTGGA | | | |
| | A | | | |
| Linker | TCTGGCGGTGGATCCGGA | 639 | SGGGSG | 640 |
| Δ | GTCGACGGATTTGGTGATGTC | 641 | VDGFGDVGALESLR | 642 |
| Caspase9 | GGTGCTCTTGAGAGTTTGAGG | | GNADLAYILSMEPC | |
| | GGAAATGCAGATTTGGCTTAC | | GHCLIINNVNFCRES | |
| | ATCCTGAGCATGGAGCCCTGT | | GLRTRTGSNIDCEK | |
| | GGCCACTGCCTCATTATCAAC | | LRRRFSSLHFMVEV | |
| | AATGTGAACTTCTGCCGTGAG | | KGDLTAKKMVLALL | |
| | TCCGGGCTCCGCACCCGCAC | | ELARQDHGALDCCV | |
| | TGGCTCCAACATCGACTGTGA | | VVILSHGCQASHLQ | |
| | GAAGTTGCGGCGTCGCTTCTC | | FPGAVYGTDGCPVS | |
| | CTCGCTGCATTTCATGGTGGA | | VEKIVNIFNGTSCPS | |
| | GGTGAAGGGCGACCTGACTG | | LGGKPKLFFIQACG | |
| | CCAAGAAAATGGTGCTGGCTT | | GEQKDHGFEVASTS | |
| | TGCTGGAGCTGGCGCGGCAG | | PEDESPGSNPEPDA | |
| | GACCACGGTGCTCTGGACTG | | TPFQEGLRTFDQLD | |
| | CTGCGTGGTGGTCATTCTCTC | | AISSLPTPSDIFVSYS | |
| | TCACGGCTGTCAGGCCAGCC | | TFPGFVSWRDPKS | |
| | ACCTGCAGTTCCCAGGGGCT | | GSVVYVETLDDIFEQ | |
| | GTCTACGGCACAGATGGATGC | | WAHSEDLQSLLLRV | |
| | CCTGTGTCGGTCGAGAAGATT | | ANAVSVKGIYKQMP | |
| | GTGAACATCTTCAATGGGACC | | GCFNFLRKKLFFKT | |
| | AGCTGCCCCAGCCTGGGAGG | | SASRA | |
| | GAAGCCCAAGCTCTTTTTCAT | | | |
| | CCAGGCCTGTGGTGGGGAGC | | | |
| | AGAAAGACCATGGGTTTGAGG | | | |
| | TGGCCTCCACTTCCCCTGAAG | | | |
| | ACGAGTCCCCTGGCAGTAACC | | | |
| | CCGAGCCAGATGCCACCCCG | | | |
| | TTCCAGGAAGGTTTGAGGACC | | | |
| | TTCGACCAGCTGGACGCCATA | | | |
| | TCTAGTTTGCCCACACCCAGT | | | |
| | GACATCTTTGTGTCCTACTCTA | | | |
| | CTTTCCCAGGTTTTGTTTCCTG | | | |
| | GAGGGACCCCAAGAGTGGCT | | | |
| | CCTGGTACGTTGAGACCCTGG | | | |
| | ACGACATCTTTGAGCAGTGGG | | | |
| | CTCACTCTGAAGACCTGCAGT | | | |
| | CCCTCCTGCTTAGGGTCGCTA | | | |
| | ATGCTGTTTCGGTGAAAGGGA | | | |
| | TTTATAAACAGATGCCTGGTT | | | |
| | GCTTTAATTTCCTCCGGAAAA | | | |
| | AACTTTTCTTTAAAACATCAGC | | | |
| | TAGCAGAGCC | | | |
| T2A | GAGGGCAGGGGAAGTCTTCT | 643 | EGRGSLLTCGDVEE | 644 |
| | AACATGCGGGGACGTGGAGG | | NPGP | |
| | AAAATCCCGGGCCC | | | |
| ΔCD19 | ATGCCACCTCCTCGCCTCCTC | 645 | MPPPRLLFFLLFLTP | 646 |
| | TTCTTCCTCCTCTTCCTCACCC | | MEVRPEEPLVVKVE | |
| | CCATGGAAGTCAGGCCCGAG | | EGDNAVLQCLKGTS | |
| | GAACCTCTAGTGGTGAAGGTG | | DGPTQQLTWSRES | |
| | GAAGAGGGAGATAACGCTGT | | PLKPFLKLSLGLPGL | |
| | GCTGCAGTGCCTCAAGGGGA | | GIHMRPLAIWLFIFN | |
| | CCTCAGATGGCCCCACTCAGC | | VSQQMGGFYLCQP | |
| | AGCTGACCTGGTCTCGGGAG | | GPPSEKAWQPGVVT | |
| | TCCCCGCTTAAACCCTTCTTA | | VNVEGSGELFRWN | |
| | AAACTCAGCCTGGGGCTGCC | | VSDLGGLGCGLKNR | |
| | AGGCCTGGGAATCCACATGA | | SSEGPSSPSGKLMS | |
| | GGCCCCTGGCCATCTGGCTTT | | PKLYVWAKDRPEIW | |
| | TCATCTTCAACGTCTCTCAACA | | EGEPPCLPPRDSLN | |
| | GATGGGGGGCTTCTACCTGT | | QSLSQDLTMAPGST | |
| | GCCAGCCGGGGCCCCCCTCT | | LWLSCGVPPDSVSR | |
| | GAGAAGGCCTGGCAGCCTGG | | GPLSVVTHVHPKGP | |
| | CTGGACAGTCAATGTGGAGG | | KSLLSLELKDDRPA | |
| | GCAGCGGGGAGCTGTTCCGG | | RDMVVVMETGLLLP | |
| | TGGAATGTTTCGGACCTAGGT | | RATAQDAGKYYCH | |
| | GGCCTGGGCTGTGGCCTGAA | | RGNLTMSFHLEITAR | |
| | GAACAGGTCCTCAGAGGGCC | | PVLWHWLLRTGGW | |
| | CCAGCTCCCCTTCCGGGAAG | | KVSAVTLAYLIFCLC | |
| | CTCATGAGCCCCAAGCTGTAT | | SLVGILHLQRALVLR | |
| | GTGTGGGCCAAAGACCGCCC | | RKRKRMTDPTRRF | |
| | TGAGATCTGGGAGGGAGAGC | | | |
| | CTCCGTGTCTCCCACCGAGG | | | |
| | GACAGCCTGAACCAGAGCCT | | | |
| | CAGCCAGGACCTCACCATGG | | | |
| | CCCCTGGCTCCACACTCTGGC | | | |
| | TGTCCTGTGGGGTACCCCCTG | | | |
| | ACTCTGTGTCCAGGGGCCCC | | | |
| | CTCTCCTGGACCCATGTGCAC | | | |
| | CCCAAGGGGCCTAAGTCATTG | | | |
| | CTGAGCCTAGAGCTGAAGGA | | | |
| | CGATCGCCCGGCCAGAGATA | | | |
| | TGTGGGTAATGGAGACGGGT | | | |
| | CTGTTGTTGCCCCGGGCCACA | | | |
| | GCTCAAGACGCTGGAAAGTAT | | | |
| | TATTGTCACCGTGGCAACCTG | | | |
| | ACCATGTCATTCCACCTGGAG | | | |
| | ATCACTGCTCGGCCAGTACTA | | | |
| | TGGCACTGGCTGCTGAGGAC | | | |
| | TGGTGGCTGGAAGGTCTCAG | | | |
| | CTGTGACTTTGGCTTATCTGA | | | |
| | TCTTCTGCCTGTGTTCCCTTGT | | | |
| | GGGCATTCTTCATCTTCAAAG | | | |
| | AGCCCTGGTCCTGAGGAGGA | | | |
| | AAAGAAAGCGAATGACTGACC | | | |
| | CCACCAGGAGATTC | | | |
| GSG | GGGAGTGGG | 647 | GSG | 648 |
| (linker) | | | | |
| P2A | GCTACGAATTTTAGCTTGCTG | 649 | ATNFSLLKQAGDVE | 650 |
| | AAGCAGGCCGGTGATGTGGA | | ENPGP | |
| | AGAGAACCCCGGGCCT | | | |
| FRBI | TGGCATGAAGGTCTGGAAGAA | 651 | WHEGLEEASRLYFG | 652 |
| | GCTTCTCGCCTTTATTTTGGC | | ERNVKGMFEVLEPL | |
| | GAACGGAACGTAAAAGGTATG | | HAMMERGPQTLKE | |
| | TTTGAAGTCCTGGAGCCATTG | | TSFNQAYGRDLMEA | |
| | CACGCCATGATGGAGCGCGG | | QEWCRKYMKSGNV | |
| | GCCTCAGACCCTCAAGGAAAC | | KDLLQAWDLYYHVF | |
| | CAGTTTTAATCAGGCCTATGG | | RRISK | |
| | GCGAGACCTCATGGAGGCAC | | | |
| | AGGAATGGTGTCGGAAGTATA | | | |
| | TGAAGTCCGGCAACGTTAAGG | | | |
| | ATCTCTTGCAGGCCTGGGACT | | | |
| | TGTATTATCACGTGTTCCGGC | | | |
| | GAATCAGCAAG | | | |
| Linker | Cgtacg | 653 | RT | 654 |
| FRBI′ | TGGCAcGAAGGTCTgGAcGAG | 655 | WHEGLDEASRLYFG | 656 |
| | GCTAGTAGACTGTATTTCGGC | | ERNVKGMFEVLEPL | |
| | GAGAGAAATGTAAAGGGAATG | | HAMMERGPQTLKE | |
| | TTCGAGGTACTGGAGCCTCTG | | TSFNQAYGRDLMEA | |
| | CACGCCATGATGGAACGCGG | | QEWCRKYMKSGNV | |
| | CCCTCAGACACTCAAGGAGAC | | KDLLQAWDLYYHVF | |
| | TAGTTTTAACCAGGCCTATGG | | RRISK | |
| | CAGGGATCTGATGGAGGCTC | | | |
| | AGGAATGGTGCCGGAAGTAtA | | | |
| | TGAAAAGCGGTAACGTGAAGG | | | |
| | ACCTGCTGCAGGCCTGGGAT | | | |
| | CTGTATTATCACGTGTTTAGAA | | | |
| | GAATCTCTAAA | | | |
| Linker | Cgtacg | 657 | RT | 658 |
| FRBI′′ | TGGCACGAAGGTTTGGAAGA | 659 | WHEGLEEASRLYFG | 660 |
| | GGCCTCCCGCCTGTATTTCGG | | ERNVKGMFEVLEPL | |
| | TGAGAGAAATGTCAAAGGTAT | | HAMMERGPQTLKE | |
| | GTTTGAAGTGCTTGAGCCCCT | | TSFNQAYGRDLMEA | |
| | GCACGCCATGATGGAACGGG | | QEWCRKYMKSGNV | |
| | GGCCGCAGACTCTGAAAGAAA | | KDLLQAWDLYYHVF | |
| | CCTCATTCAACCAGGCATACG | | RRISK* | |
| | GGCGAGACCTGATGGAAGCG | | | |
| | CAGGAATGGTGTAGGAAGTAC | | | |
| | ATGAAGTCCGGAAATGTGAAG | | | |
| | GACTTGCTCCAGGCTTGGGAC | | | |
| | CTGTACTATCACGTATTTCGG | | | |
| | AGAATAAGCAAG-TAA | | | |

pBP0655—pSFG-ΔMyr.FRB_{I}.MC.2A-ΔCD19

| | | SEQ ID | | SEQ ID |
|---|---|---|---|---|
| Fragment | Nucleotide | NO: | Peptide | NO: |
| FRB_{I}′ | TGGCACGAGGGGCTGGAGGA | 661 | WHEGLEEASRLYFG | 662 |
| | GGCAAGTCGACTGTATTTTGGA | | ERNVKGMFEVLEPL | |
| | GAACGCAACGTAAAGGGAATG | | HAMMERGPQTLKET | |
| | TTTGAGGTGCTCGAACCACTCC | | SFNQAYGRDLMEAQ | |
| | ATGCTATGATGGAAAGGGGGC | | EWCRKYMKSGNVKD | |
| | CTCAGACTCTTAAGGAAACAAG | | LLQAWDLYYHVFRRI | |
| | TTTTAATCAAGCCTACGGACGA | | SK | |
| | GACCTCATGGAGGCGCAGGAG | | | |
| | TGGTGCAGAAAATACATGAAAT | | | |
| | CAGGTAATGTTAAGGACCTGCT | | | |
| | GCAGGCATGGGACCTGTACTA | | | |
| | CCATGTCTTCAGGCGCATCTCA | | | |
| | AAG | | | |
| Linker | ATGCATTCTGGTGGAGGATCA | 663 | MHSGGGSGVE | 664 |
| | GGCGTTGAA | | | |
| MyD88L | GCAGCTGGAGGCCCTGGCGCA | 665 | AAGGPGAGSAAPVS | 666 |
| | GGCTCTGCAGCCCCTGTATCTA | | STSSLPLAALNMRVR | |
| | GCACCTCTTCTCTTCCTCTGGC | | RRLSLFLNVRTQVAA | |
| | TGCGCTGAACATGAGAGTGCG | | DWTALAEEMDFEYL | |
| | GAGACGGTTGTCTTTGTTCTTG | | EIRQLETQADPTGRL | |
| | AATGTCAGAACACAGGTTGCAG | | LDAWQGRPGASVGR | |
| | CGGACTGGACCGCTCTGGCCG | | LLDLLTKLGRDDVLL | |
| | AGGAAATGGACTTCGAGTACCT | | ELGPSIEEDCQKYILK | |
| | GGAGATCAGGCAACTCGAAAC | | QQQEEAEKPLQVAA | |
| | GCAGGCAGATCCTACAGGCAG | | VDSSVPRTAELAGIT | |
| | ACTGTTGGATGCGTGGCAGGG | | TLDDPLGHMPERFD | |
| | ACGGCCCGGAGCCAGCGTTGG | | AFICYCPSDI | |
| | ACGGCTCCTTGATCTTCTCACC | | | |
| | AAGCTGGGCAGAGATGACGTG | | | |
| | CTGCTGGAATTGGGCCCCAGT | | | |
| | ATTGAGGAGGACTGCCAAAAAT | | | |
| | ACATCTTGAAGCAGCAACAGGA | | | |
| | GGAGGCGGAGAAGCCCCTCCA | | | |
| | GGTCGCAGCCGTCGATTCATC | | | |
| | CGTGCCTAGAACAGCCGAACT | | | |
| | TGCAGGCATCACTACCCTGGAT | | | |
| | GATCCCCTGGGCCATATGCCA | | | |
| | GAGAGGTTTGATGCGTTTATCT | | | |
| | GCTATTGCCCAAGCGATATC | | | |
| Linker | GTTGAG | 667 | VE | 668 |
| hCD40 | AAGAAGGTGGCCAAGAAGCCA | 669 | KKVAKKPTNKAPHPK | 670 |
| | ACCAATAAAGCTCCACATCCTA | | QEPQEINFPDDLPGS | |
| | AACAGGAGCCACAAGAAATCAA | | NTAAPVQETLHGCQ | |
| | CTTTCCAGATGATCTCCCTGGC | | PVTQEDGKESRISVQ | |
| | TCTAATACTGCAGCCCCCGTGC | | ERQ | |
| | AGGAAACCCTGCACGGCTGTC | | | |
| | AACCTGTGACACAGGAAGACG | | | |
| | GGAAGGAAAGCAGGATATCCG | | | |
| | TGCAGGAACGGCAA | | | |
| Linker | GTCGAC | 671 | VD | 672 |
| HA | TACCCATACGACGTGCCAGATT | 673 | YPYDVPDYA | 674 |
| epitope | ATGCT | | | |
| Linker | CCGCGG | 675 | PR | 676 |
| T2A | GAAGGCCGAGGGAGCCTGCTG | 677 | EGRGSLLTCGDVEE | 678 |
| | ACATGTGGCGATGTGGAGGAA | | NPGP | |
| | AACCCAGGACCA | | | |
| ΔCD19 | ATGCCACCACCTCGCCTGCTG | 679 | MPPPRLLFFLLFLTP | 680 |
| | TTCTTTCTGCTGTTCCTGACAC | | MEVRPEEPLVVKVEE | |
| | CTATGGAGGTGCGACCTGAGG | | GDNAVLQCLKGTSD | |
| | AACCACTGGTCGTGAAGGTCG | | GPTQQLTWSRESPL | |
| | AGGAAGGCGACAATGCCGTGC | | KPFLKLSLGLPGLGIH | |
| | TGCAGTGCCTGAAAGGCACTT | | MRPLAIWLFIFNVSQ | |
| | CTGATGGGCCAACTCAGCAGC | | QMGGFYLCQPGPPS | |
| | TGACCTGGTCCAGGGAGTCTC | | EKAWQPGWTVNVE | |
| | CCCTGAAGCCTTTTCTGAAACT | | GSGELFRWNVSDLG | |
| | GAGCCTGGGACTGCCAGGACT | | GLGCGLKNRSSEGP | |
| | GGGAATCCACATGCGCCCTCT | | SSPSGKLMSPKLYV | |
| | GGCTATCTGGCTGTTCATCTTC | | WAKDRPEIWEGEPP | |
| | AACGTGAGCCAGCAGATGGGA | | CLPPRDSLNQSLSQ | |
| | GGATTCTACCTGTGCCAGCCA | | DLTMAPGSTLWLSC | |
| | GGACCACCATCCGAGAAGGCC | | GVPPDSVSRGPLSW | |
| | TGGCAGCCTGGATGGACCGTC | | THVHPKGPKSLLSLE | |
| | AACGTGGAGGGGTCTGGAGAA | | LKDDRPARDMWVME | |
| | CTGTTTAGGTGGAATGTGAGTG | | TGLLLPRATAQDAGK | |
| | ACCTGGGAGGACTGGGATGTG | | YYCHRGNLTMSFHL | |
| | GGCTGAAGAACCGCTCCTCTG | | EITARPVLWHWLLRT | |
| | AAGGCCCAAGTTCACCCTCAG | | GGWKVSAVTLAYLIF | |
| | GGAAGCTGATGAGCCCAAAAC | | CLCSLVGILHLQRAL | |
| | TGTACGTGTGGGCCAAAGATC | | VLRRKRKRMTDPTR | |
| | GGCCCGAGATCTGGGAGGGAG | | RF* | |
| | AACCTCCATGCCTGCCACCTAG | | | |
| | AGACAGCCTGAATCAGAGTCT | | | |
| | GTCACAGGATCTGACAATGGC | | | |
| | CCCCGGGTCCACTCTGTGGCT | | | |
| | GTCTTGTGGAGTCCCACCCGA | | | |
| | CAGCGTGTCCAGAGGCCCTCT | | | |
| | GTCCTGGACCCACGTGCATCC | | | |
| | TAAGGGGCCAAAAAGTCTGCT | | | |
| | GTCACTGGAACTGAAGGACGA | | | |
| | TCGGCCTGCCAGAGACATGTG | | | |
| | GGTCATGGAGACTGGACTGCT | | | |
| | GCTGCCACGAGCAACCGCACA | | | |
| | GGATGCTGGAAAATACTATTGC | | | |
| | CACCGGGGCAATCTGACAATG | | | |
| | TCCTTCCATCTGGAGATCACTG | | | |
| | CAAGGCCCGTGCTGTGGCACT | | | |
| | GGCTGCTGCGAACCGGAGGAT | | | |
| | GGAAGGTCAGTGCTGTGACAC | | | |
| | TGGCATATCTGATCTTTTGCCT | | | |
| | GTGCTCCCTGGTGGGCATTCT | | | |
| | GCATCTGCAGAGAGCCCTGGT | | | |
| | GCTGCGGAGAAAGAGAAAGAG | | | |
| | AATGACTGACCCAACAAGAAG | | | |
| | GTTTTGA | | | |

pBP0498—pSFG-ΔMyr.iMC.FRB_{I}2.P2A-ΔCD19

| | | SEQ ID | | SEQ ID |
|---|---|---|---|---|
| Fragment | Nucleotide | NO: | Peptide | NO: |
| Start | ATGCTCGAG | 681 | MLE | 682 |
| FRB_{I}\hat{ } | TGGCACGAGGGGCTGGAGGA | 683 | WHEGLEEASRLYFG | 684 |
| | GGCAAGTCGACTGTATTTTGGA | | ERNVKGMFEVLEPL | |
| | GAACGCAACGTAAAGGGAATG | | HAMMERGPQTLKET | |
| | TTTGAGGTGCTCGAACCACTCC | | SFNQAYGRDLMEAQ | |
| | ATGCTATGATGGAAAGGGGGC | | EWCRKYMKSGNVKD | |
| | CTCAGACTCTTAAGGAAACAAG | | LLQAWDLYYHVFRRI | |
| | TTTTAATCAAGCCTACGGACGA | | SK | |
| | GACCTCATGGAGGCGCAGGAG | | | |
| | TGGTGCAGAAAATACATGAAAT | | | |
| | CAGGTAATGTTAAGGACCTGCT | | | |
| | GCAGGCATGGGACCTGTACTA | | | |
| | CCATGTCTTCAGGCGCATCTCA | | | |
| | AAG | | | |
| Linker | ATGCAT | 685 | MH | 686 |
| FRB_{I}\hat{ }\hat{ } | TGGCACGAAGGCCTGGAAGAG | 687 | WHEGLEEASRLYFG | 688 |
| | GCCTCAAGACTTTACTTTGGTG | | ERNVKGMFEVLEPL | |
| | AACGCAACGTTAAAGGCATGTT | | HAMMERGPQTLKET | |
| | CGAGGTGCTGGAACCCTTGCA | | SFNQAYGRDLMEAQ | |
| | TGCAATGATGGAGCGAGGTCC | | EWCRKYMKSGNVKD | |
| | TCAGACACTCAAAGAGACATCT | | LLQAWDLYYHVFRRI | |
| | TTTAACCAGGCGTATGGACGG | | SK | |
| | GACCTCATGGAGGCTCAGGAA | | | |
| | TGGTGCCGCAAGTACATGAAAA | | | |
| | GTGGGAATGTGAAGGATCTGC | | | |
| | TGCAAGCATGGGATCTGTATTA | | | |
| | CCACGTGTTTAGACGGATCAG | | | |
| | CAAA | | | |
| Linker | ATGCATTCTGGTGGAGGATCA | 689 | MHSGGGSGVE | 690 |
| | GGCGTTGAA | | | |
| MyD88L | GCAGCTGGAGGCCCTGGCGCA | 691 | AAGGPGAGSAAPVS | 692 |
| | GGCTCTGCAGCCCCTGTATCTA | | STSSLPLAALNMRVR | |
| | GCACCTCTTCTCTTCCTCTGGC | | RRLSLFLNVRTQVAA | |
| | TGCGCTGAACATGAGAGTGCG | | DWTALAEEMDFEYL | |
| | GAGACGGTTGTCTTTGTTCTTG | | EIRQLETQADPTGRL | |
| | AATGTCAGAACACAGGTTGCAG | | LDAWQGRPGASVGR | |
| | CGGACTGGACCGCTCTGGCCG | | LLDLLTKLGRDDVLL | |
| | AGGAAATGGACTTCGAGTACCT | | ELGPSIEEDCQKYILK | |
| | GGAGATCAGGCAACTCGAAAC | | QQQEEAEKPLQVAA | |
| | GCAGGCAGATCCTACAGGCAG | | VDSSVPRTAELAGIT | |
| | ACTGTTGGATGCGTGGCAGGG | | TLDDPLGHMPERFD | |
| | ACGGCCCGGAGCCAGCGTTGG | | AFICYCPSDI | |
| | ACGGCTCCTTGATCTTCTCACC | | | |
| | AAGCTGGGCAGAGATGACGTG | | | |
| | CTGCTGGAATTGGGCCCCAGT | | | |
| | ATTGAGGAGGACTGCCAAAAAT | | | |
| | ACATCTTGAAGCAGCAACAGGA | | | |
| | GGAGGCGGAGAAGCCCCTCCA | | | |
| | GGTCGCAGCCGTCGATTCATC | | | |
| | CGTGCCTAGAACAGCCGAACT | | | |
| | TGCAGGCATCACTACCCTGGAT | | | |
| | GATCCCCTGGGCCATATGCCA | | | |
| | GAGAGGTTTGATGCGTTTATCT | | | |
| | GCTATTGCCCAAGCGATATC | | | |
| Linker | GTTGAG | 693 | VE | 694 |
| hCD40 | AAGAAGGTGGCCAAGAAGCCA | 695 | KKVAKKPTNKAPHPK | 696 |
| | ACCAATAAAGCTCCACATCCTA | | QEPQEINFPDDLPGS | |
| | AACAGGAGCCACAAGAAATCAA | | NTAAPVQETLHGCQ | |
| | CTTTCCAGATGATCTCCCTGGC | | PVTQEDGKESRISVQ | |
| | TCTAATACTGCAGCCCCCGTGC | | ERQ | |
| | AGGAAACCCTGCACGGCTGTC | | | |
| | AACCTGTGACACAGGAAGACG | | | |
| | GGAAGGAAAGCAGGATATCCG | | | |
| | TGCAGGAACGGCAA | | | |
| Linker | GTCGAC | 697 | VD | 698 |
| HA | TACCCATACGACGTGCCAGATT | 699 | YPYDVPDYA | 700 |
| | ATGCT | | | |
| Linker | CCGCGG | 701 | PR | 702 |
| T2A | GAAGGCCGAGGGAGCCTGCTG | 703 | EGRGSLLTCGDVEE | 704 |
| | ACATGTGGCGATGTGGAGGAA | | NPGP | |
| | AACCCAGGACCA | | | |
| ΔCD19 | ATGCCACCACCTCGCCTGCTG | 705 | MPPPRLLFFLLFLTP | 706 |
| | TTCTTTCTGCTGTTCCTGACAC | | MEVRPEEPLVVKVEE | |
| | CTATGGAGGTGCGACCTGAGG | | GDNAVLQCLKGTSD | |
| | AACCACTGGTCGTGAAGGTCG | | GPTQQLTWSRESPL | |
| | AGGAAGGCGACAATGCCGTGC | | KPFLKLSLGLPGLGIH | |
| | TGCAGTGCCTGAAAGGCACTT | | MRPLAIWLFIFNVSQ | |
| | CTGATGGGCCAACTCAGCAGC | | QMGGFYLCQPGPPS | |
| | TGACCTGGTCCAGGGAGTCTC | | EKAWQPGWTVNVE | |
| | CCCTGAAGCCTTTTCTGAAACT | | GSGELFRWNVSDLG | |
| | GAGCCTGGGACTGCCAGGACT | | GLGCGLKNRSSEGP | |
| | GGGAATCCACATGCGCCCTCT | | SSPSGKLMSPKLYV | |
| | GGCTATCTGGCTGTTCATCTTC | | WAKDRPEIWEGEPP | |
| | AACGTGAGCCAGCAGATGGGA | | CLPPRDSLNQSLSQ | |
| | GGATTCTACCTGTGCCAGCCA | | DLTMAPGSTLWLSC | |
| | GGACCACCATCCGAGAAGGCC | | GVPPDSVSRGPLSW | |
| | TGGCAGCCTGGATGGACCGTC | | THVHPKGPKSLLSLE | |
| | AACGTGGAGGGGTCTGGAGAA | | LKDDRPARDMWVME | |
| | CTGTTTAGGTGGAATGTGAGTG | | TGLLLPRATAQDAGK | |
| | ACCTGGGAGGACTGGGATGTG | | YYCHRGNLTMSFHL | |
| | GGCTGAAGAACCGCTCCTCTG | | EITARPVLWHWLLRT | |
| | AAGGCCCAAGTTCACCCTCAG | | GGWKVSAVTLAYLIF | |
| | GGAAGCTGATGAGCCCAAAAC | | CLCSLVGILHLQRAL | |
| | TGTACGTGTGGGCCAAAGATC | | VLRRKRKRMTDPTR | |
| | GGCCCGAGATCTGGGAGGGAG | | RF* | |
| | AACCTCCATGCCTGCCACCTAG | | | |
| | AGACAGCCTGAATCAGAGTCT | | | |
| | GTCACAGGATCTGACAATGGC | | | |
| | CCCCGGGTCCACTCTGTGGCT | | | |
| | GTCTTGTGGAGTCCCACCCGA | | | |
| | CAGCGTGTCCAGAGGCCCTCT | | | |
| | GTCCTGGACCCACGTGCATCC | | | |
| | TAAGGGGCCAAAAAGTCTGCT | | | |
| | GTCACTGGAACTGAAGGACGA | | | |
| | TCGGCCTGCCAGAGACATGTG | | | |
| | GGTCATGGAGACTGGACTGCT | | | |
| | GCTGCCACGAGCAACCGCACA | | | |
| | GGATGCTGGAAAATACTATTGC | | | |
| | CACCGGGGCAATCTGACAATG | | | |
| | TCCTTCCATCTGGAGATCACTG | | | |
| | CAAGGCCCGTGCTGTGGCACT | | | |
| | GGCTGCTGCGAACCGGAGGAT | | | |
| | GGAAGGTCAGTGCTGTGACAC | | | |
| | TGGCATATCTGATCTTTTGCCT | | | |
| | GTGCTCCCTGGTGGGCATTCT | | | |
| | GCATCTGCAGAGAGCCCTGGT | | | |
| | GCTGCGGAGAAAGAGAAAGAG | | | |
| | AATGACTGACCCAACAAGAAG | | | |
| | GTTTTGA | | | |

pBP0488—pSFG-aHER2.Q.8stm.CD3zeta.Fpk2

| | | SEQ ID | | SEQ ID |
|---|---|---|---|---|
| Fragment | Nucleotide | NO: | Peptide | NO: |
| Signal | ATGGAGTTTGGACTTTCTTGGT | 707 | MEFGLSWLFLVAILK | 708 |
| Peptide | TGTTTTTGGTGGCAATTCTGAA | | GVQCSR | |
| | GGGTGTCCAGTGTAGCAGG | | | |
| FRP5-VL | GACATCCAATTGACACAATCAC | 709 | DIQLTQSHKFLSTSV | 710 |
| | ACAAATTTCTCTCAACTTCTGTA | | GDRVSITCKASQDVY | |
| | GGAGACAGAGTGAGCATAACC | | NAVAWYQQKPGQSP | |
| | TGCAAAGCATCCCAGGACGTG | | KLLIYSASSRYTGVP | |
| | TACAATGCTGTGGCTTGGTACC | | SRFTGSGSGPDFTFT | |
| | AACAGAAGCCTGGACAATCCC | | ISSVQAEDLAVYFCQ | |
| | CAAAATTGCTGATTTATTCTGC | | QHFRTPFTFGSGTKL | |
| | CTCTAGTAGGTACACTGGGGTA | | EIKAL | |
| | CCTTCTCGGTTTACGGGCTCTG | | | |
| | GGTCCGGACCAGATTTCACGTT | | | |
| | CACAATCAGTTCCGTTCAAGCT | | | |
| | GAAGACCTCGCTGTTTATTTTT | | | |
| | GCCAGCAGCACTTCCGAACCC | | | |
| | CTTTTACTTTTGGCTCAGGCAC | | | |
| | TAAGTTGGAAATCAAGGCTTTG | | | |
| Linker | GGCGGAGGAAGCGGAGGTGG | 711 | GGGSGGGG | 712 |
| | GGGC | | | |
| FRP5-VH | GAAGTCCAATTGCAACAGTCAG | 713 | EVQLQQSGPELKKP | 714 |
| | GCCCCGAATTGAAAAAGCCCG | | GETVKISCKASGYPF | |
| | GCGAAACAGTGAAGATATCTTG | | TNYGMNWVKQAPG | |
| | TAAAGCCTCCGGTTACCCTTTT | | QGLKWMGWINTSTG | |
| | ACGAACTATGGAATGAACTGG | | ESTFADDFKGRFDFS | |
| | GTCAAACAAGCCCCTGGACAG | | LETSANTAYLQINNLK | |
| | GGATTGAAGTGGATGGGATGG | | SEDMATYFCARWEV | |
| | ATCAATACATCAACAGGCGAGT | | YHGYVPYWGQGTTV | |
| | CTACCTTCGCAGATGATTTCAA | | TVSS | |
| | AGGTCGCTTTGACTTCTCACTG | | | |
| | GAGACCAGTGCAAATACCGCC | | | |
| | TACCTTCAGATTAACAATCTTAA | | | |
| | AAGCGAGGATATGGCAACCTA | | | |
| | CTTTTGCGCAAGATGGGAAGTT | | | |
| | TATCACGGGTACGTGCCATACT | | | |
| | GGGGACAAGGAACGACAGTGA | | | |
| | CAGTTAGTAGC | | | |
| Linker | GGATCC | 715 | GS | 716 |
| Q- | GAACTTCCTACTCAGGGGACTT | 717 | ELPTQGTFSNVSTNV | 718 |
| Bend-10 | TCTCAAACGTTAGCACAAACGT | | S | |
| (CD34 | AAGT | | | |
| Epitope) | | | | |
| CD8 | CCCGCCCCAAGACCCCCCACA | 719 | PAPRPPTPAPTIASQ | 720 |
| Stalk | CCTGCGCCGACCATTGCTTCTC | | PLSLRPEACRPAAG | |
| | AACCCCTGAGTTTGAGACCCG | | GAVHTRGLDFACD | |
| | AGGCCTGCCGGCCAGCTGCCG | | | |
| | GCGGGGCCGTGCATACAAGAG | | | |
| | GACTCGATTTCGCTTGCGAC | | | |
| CD8atm | ATCTATATCTGGGCACCTCTCG | 721 | IYIWAPLAGTCGVLLL | 722 |
| | CTGGCACCTGTGGAGTCCTTCT | | SLVITLYCNHRNRRR | |
| | GCTCAGCCTGGTTATTACTCTG | | VCKCPR | |
| | TACTGTAATCACCGGAATCGCC | | | |
| | GCCGCGTTTGTAAGTGTCCCA | | | |
| | GG | | | |
| Linker | CTCGAG | 723 | LE | 724 |
| CD3 | AGAGTGAAGTTCAGCAGGAGC | 725 | RVKFSRSADAPAYQ | 726 |
| zeta | GCAGACGCCCCCGCGTACCAG | | QGQNQLYNELNLGR | |
| | CAGGGCCAGAACCAGCTCTAT | | REEYDVLDKRRGRD | |
| | AACGAGCTCAATCTAGGACGAA | | PEMGGKPRRKNPQE | |
| | GAGAGGAGTACGATGTTTTGG | | GLYNELQKDKMAEA | |
| | ACAAGAGACGTGGCCGGGACC | | YSEIGMKGERRRGK | |
| | CTGAGATGGGGGGAAAGCCGA | | GHDGLYQGLSTATK | |
| | GAAGGAAGAACCCTCAGGAAG | | DTYDALHMQALPP | |
| | GCCTGTACAATGAACTGCAGAA | | | |
| | AGATAAGATGGCGGAGGCCTA | | | |
| | CAGTGAGATTGGGATGAAAGG | | | |
| | CGAGCGCCGGAGGGGCAAGG | | | |
| | GGCACGATGGCCTTTACCAGG | | | |
| | GTCTCAGTACAGCCACCAAGG | | | |
| | ACACCTACGACGCCCTTCACAT | | | |
| | GCAAGCTCTTCCACCTCG | | | |
| Linker | TCAGGCGGTGGCTCAGGTGTT | 727 | SGGGSGVN | 728 |
| | AAC | | | |
| Fpk′ | GGCGTCCAAGTCGAAACCATTA | 729 | GVQVETISPGDGRTF | 730 |
| | GTCCCGGCGATGGCAGAACAT | | PKRGQTCVVHYTGM | |
| | TTCCTAAAAGGGGACAAACATG | | LEDGKKFDSSRDRN | |
| | TGTCGTCCATTATACAGGCATG | | KPFKFMLGKQEVIRG | |
| | TTGGAGGACGGCAAAAAGTTC | | WEEGVAQMSVGQR | |
| | GACAGTAGTAGAGATCGCAATA | | AKLTISPDYAYGATG | |
| | AACCTTTCAAATTCATGTTGGG | | HPPKIPPHATLVFDV | |
| | AAAACAAGAAGTCATTAGGGGA | | ELLKLE | |
| | TGGGAGGAGGGCGTGGCTCAA | | | |
| | ATGTCCGTCGGCCAACGCGCT | | | |
| | AAGCTCACCATCAGCCCCGAC | | | |
| | TACGCATACGGCGCTACCGGA | | | |
| | CATCCCCCTAAGATTCCCCCTC | | | |
| | ACGCTACCTTGGTGTTTGACGT | | | |
| | CGAACTGTTGAAGCTCGAA | | | |
| Linker | GTTAAC | 731 | VN | 732 |
| Fpk | GGAGTGCAGGTGGAGACTATC | 733 | GVQVETISPGDGRTF | 734 |
| | TCCCCAGGAGACGGGCGCACC | | PKRGQTCVVHYTGM | |
| | TTCCCCAAGCGCGGCCAGACC | | LEDGKKFDSSRDRN | |
| | TGCGTGGTGCACTACACCGGG | | KPFKFMLGKQEVIRG | |
| | ATGCTTGAAGATGGAAAGAAAT | | WEEGVAQMSVGQR | |
| | TCGATTCCTCTCGGGACAGAAA | | AKLTISPDYAYGATG | |
| | CAAGCCCTTTAAGTTTATGCTA | | HPPKIPPHATLVFDV | |
| | GGCAAGCAGGAGGTGATCCGA | | ELLKLE | |
| | GGCTGGGAAGAAGGGGTTGCC | | | |
| | CAGATGAGTGTGGGTCAGAGA | | | |
| | GCCAAACTGACTATATCTCCAG | | | |
| | ATTATGCCTATGGTGCCACTGG | | | |
| | GCACCCACCTAAGATCCCACC | | | |
| | ACATGCCACTCTCGTCTTCGAT | | | |
| | GTGGAGCTTCTAAAACTGGAA | | | |
| GSG | GGATCGGGA | 735 | GSG | 736 |
| Linker | | | | |
| P2A | GCTACTAACTTCAGCCTGCTGA | 737 | ATNFSLLKQAGDVEE | 738 |
| | AGCAGGCTGGAGACGTGGAGG | | NPGP | |
| | AGAACCCCGGGCCT | | | |

pBP0467—pSH1-FRBI′.FRBI.LS.ΔCaspase9

| | | SEQ ID | | SEQ ID |
|---|---|---|---|---|
| Fragment | Nucleotide | NO: | Peptide | NO: |
| FRB_{I}′ | TGGCATGAAGGCCTGGAAGAG | 739 | WHEGLEEASRLYFG | 740 |
| | GCATCTCGTTTGTACTTTGGGG | | ERNVKGMFEVLEPL | |
| | AAAGGAACGTGAAAGGCATGTT | | HAMMERGPQTLKE | |
| | TGAGGTGCTGGAGCCCTTGCA | | TSFNQAYGRDLMEA | |
| | CGCTATGATGGAACGGGGCCC | | QEWCRKYMKSGNV | |
| | CCAGACTCTGAAGGAAACATCC | | KDLLQAWDLYYHVF | |
| | TTTAATCAGGCCTATGGTCGAG | | RRISK | |
| | ATTTAATGGAGGCCCAAGAGTG | | | |
| | GTGCAGGAAGTACATGAAATCA | | | |
| | GGGAATGTCAAGGACCTCCTC | | | |
| | CAAGCCTGGGACCTCTATTATC | | | |
| | ATGTGTTCCGACGAATCTCAAA | | | |
| | G | | | |
| Linker | GTCGAG | 741 | VE | 742 |
| FRB_{I} | TGGCATGAAGGGTTGGAAGAA | 743 | WHEGLEEASRLYFG | 744 |
| | GCTTCAAGGCTGTACTTCGGA | | ERNVKGMFEVLEPL | |
| | GAGAGGAACGTGAAGGGCATG | | HAMMERGPQTLKE | |
| | TTTGAGGTTCTTGAACCTCTGC | | TSFNQAYGRDLMEA | |
| | ACGCCATGATGGAACGGGGAC | | QEWCRKYMKSGNV | |
| | CGCAGACACTGAAAGAAACCT | | KDLLQAWDLYYHVF | |
| | CTTTTAATCAGGCCTACGGCAG | | RRISK | |
| | AGACCTGATGGAGGCCCAAGA | | | |
| | ATGGTGTAGAAAGTATATGAAA | | | |
| | TCCGGTAACGTGAAAGACCTG | | | |
| | CTCCAGGCCTGGGACCTTTATT | | | |
| | ACCATGTGTTCAGGCGGATCA | | | |
| | GTAAG | | | |
| Linker | TCAGGCGGTGGCTCAGGT | 745 | SGGGSG | 746 |
| Δ | GTCGACGGATTTGGTGATGTC | 747 | VDGFGDVGALESLR | 748 |
| Caspase9 | GGTGCTCTTGAGAGTTTGAGG | | GNADLAYILSMEPC | |
| | GGAAATGCAGATTTGGCTTACA | | GHCLIINNVNFCRES | |
| | TCCTGAGCATGGAGCCCTGTG | | GLRTRTGSNIDCEK | |
| | GCCACTGCCTCATTATCAACAA | | LRRRFSSLHFMVEV | |
| | TGTGAACTTCTGCCGTGAGTCC | | KGDLTAKKMVLALL | |
| | GGGCTCCGCACCCGCACTGGC | | ELARQDHGALDCCV | |
| | TCCAACATCGACTGTGAGAAGT | | VVILSHGCQASHLQ | |
| | TGCGGCGTCGCTTCTCCTCGC | | FPGAVYGTDGCPVS | |
| | TGCATTTCATGGTGGAGGTGAA | | VEKIVNIFNGTSCPS | |
| | GGGCGACCTGACTGCCAAGAA | | LGGKPKLFFIQACG | |
| | AATGGTGCTGGCTTTGCTGGA | | GEQKDHGFEVASTS | |
| | GCTGGCGCgGCAGGACCACGG | | PEDESPGSNPEPDA | |
| | TGCTCTGGACTGCTGCGTGGT | | TPFQEGLRTFDQLD | |
| | GGTCATTCTCTCTCACGGCTGT | | AISSLPTPSDIFVSYS | |
| | CAGGCCAGCCACCTGCAGTTC | | TFPGFVSWRDPKS | |
| | CCAGGGGCTGTCTACGGCACA | | GSWYVETLDDIFEQ | |
| | GATGGATGCCCTGTGTCGGTC | | WAHSEDLQSLLLRV | |
| | GAGAAGATTGTGAACATCTTCA | | ANAVSVKGIYKQMP | |
| | ATGGGACCAGCTGCCCCAGCC | | GCFNFLRKKLFFKT | |
| | TGGGAGGGAAGCCCAAGCTCT | | SASRAEGRGSLLTC | |
| | TTTTCATCCAGGCCTGTGGTGG | | GDVEENPGP* | |
| | GGAGCAGAAAGACCATGGGTT | | | |
| | TGAGGTGGCCTCCACTTCCCC | | | |
| | TGAAGACGAGTCCCCTGGCAG | | | |
| | TAACCCCGAGCCAGATGCCAC | | | |
| | CCCGTTCCAGGAAGGTTTGAG | | | |
| | GACCTTCGACCAGCTGGACGC | | | |
| | CATATCTAGTTTGCCCACACCC | | | |
| | AGTGACATCTTTGTGTCCTACT | | | |
| | CTACTTTCCCAGGTTTTGTTTC | | | |
| | CTGGAGGGACCCCAAGAGTGG | | | |
| | CTCCTGGTACGTTGAGACCCT | | | |
| | GGACGACATCTTTGAGCAGTG | | | |
| | GGCTCACTCTGAAGACCTGCA | | | |
| | GTCCCTCCTGCTTAGGGTCGC | | | |
| | TAATGCTGTTTCGGTGAAAGGG | | | |
| | ATTTATAAACAGATGCCTGGTT | | | |
| | GCTTTAATTTCCTCCGGAAAAA | | | |
| | ACTTTTCTTTAAAACATCAGCTA | | | |
| | GCAGAGCCGAGGGCAGGGGA | | | |
| | AGTCTTCTAACATGCGGGGAC | | | |
| | GTGGAGGAAAATCCCGGGCCC | | | |
| | TGA | | | |

pBP0606—pSFG-k-ΔMyriMC.2A-ΔCD19

| | | SEQ ID | | SEQ ID |
|---|---|---|---|---|
| Fragment | Nucleotide | NO: | Peptide | NO: |
| MyD88 | ATGGCTGCAGGAGGTCCCGGC | 749 | MAAGGPGAGSAAP | 750 |
| | GCGGGGTCTGCGGCCCCGGT | | VSSTSSLPLAALNM | |
| | CTCCTCCACATCCTCCCTTCCC | | RVRRRLSLFLNVRT | |
| | CTGGCTGCTCTCAACATGCGA | | QVAADWTALAEEM | |
| | GTGCGGCGCCGCCTGTCTCTG | | DFEYLEIRQLETQAD | |
| | TTCTTGAACGTGCGGACACAG | | PTGRLLDAWQGRP | |
| | GTGGCGGCCGACTGGACCGC | | GASVGRLLDLLTKL | |
| | GCTGGCGGAGGAGATGGACTT | | GRDDVLLELGPSIEE | |
| | TGAGTACTTGGAGATCCGGCA | | DCQKYILKQQQEEA | |
| | ACTGGAGACACAAGCGGACCC | | EKPLQVAAVDSSVP | |
| | CACTGGCAGGCTGCTGGACGC | | RTAELAGITTLDDPL | |
| | CTGGCAGGGACGCCCTGGCGC | | GHMPERFDAFICYC | |
| | CTCTGTAGGCCGACTGCTCGA | | PSDI | |
| | TCTGCTTACCAAGCTGGGCCG | | | |
| | CGACGACGTGCTGCTGGAGCT | | | |
| | GGGACCCAGCATTGAGGAGGA | | | |
| | TTGCCAAAAGTATATCTTGAAG | | | |
| | CAGCAGCAGGAGGAGGCTGAG | | | |
| | AAGCCTTTACAGGTGGCCGCT | | | |
| | GTAGACAGCAGTGTCCCACGG | | | |
| | ACAGCAGAGCTGGCGGGCATC | | | |
| | ACCACACTTGATGACCCCCTG | | | |
| | GGGCATATGCCTGAGCGTTTC | | | |
| | GATGCCTTCATCTGCTATTGCC | | | |
| | CCAGCGACATC | | | |
| Linker | GTCGAG | 751 | VG | 752 |
| hCD40 | AAAAAGGTGGCCAAGAAGCCA | 753 | KKVAKKPTNKAPHP | 754 |
| | ACCAATAAGGCCCCCCACCCC | | KQEPQEINFPDDLP | |
| | AAGCAGGAGCCCCAGGAGATC | | GSNTAAPVQETLHG | |
| | AATTTTCCCGACGATCTTCCTG | | CQPVTQEDGKESRI | |
| | GCTCCAACACTGCTGCTCCAGT | | SVQERQ | |
| | GCAGGAGACTTTACATGGATG | | | |
| | CCAACCGGTCACCCAGGAGGA | | | |
| | TGGCAAAGAGAGTCGCATCTC | | | |
| | AGTGCAGGAGAGACAG | | | |
| Linker | GTCGAG | 755 | VG | 756 |
| Fv′ | GGCGTCCAAGTCGAAACCATTA | 757 | GVQVETISPGDGRT | 758 |
| | GTCCCGGCGATGGCAGAACAT | | FPKRGQTCVVHYTG | |
| | TTCCTAAAAGGGGACAAACATG | | MLEDGKKVDSSRD | |
| | TGTCGTCCATTATACAGGCATG | | RNKPFKFMLGKQEV | |
| | TTGGAGGACGGCAAAAAGGTG | | IRGWEEGVAQMSV | |
| | GACAGTAGTAGAGATCGCAATA | | GQRAKLTISPDYAY | |
| | AACCTTTCAAATTCATGTTGGG | | GATGHPGIIPPHATL | |
| | AAAACAAGAAGTCATTAGGGGA | | VFDVELLKLE | |
| | TGGGAGGAGGGCGTGGCTCAA | | | |
| | ATGTCCGTCGGCCAACGCGCT | | | |
| | AAGCTCACCATCAGCCCCGAC | | | |
| | TACGCATACGGCGCTACCGGA | | | |
| | CATCCCGGAATTATTCCCCCTC | | | |
| | ACGCTACCTTGGTGTTTGACGT | | | |
| | CGAACTGTTGAAGCTCGAA | | | |
| Linker | GTCGAG | 759 | VG | 760 |
| Fv | GGAGTGCAGGTGGAGACTATC | 761 | GVQVETISPGDGRT | 762 |
| | TCCCCAGGAGACGGGCGCACC | | FPKRGQTCVVHYTG | |
| | TTCCCCAAGCGCGGCCAGACC | | MLEDGKKVDSSRD | |
| | TGCGTGGTGCACTACACCGGG | | RNKPFKFMLGKQEV | |
| | ATGCTTGAAGATGGAAAGAAAG | | IRGWEEGVAQMSV | |
| | TTGATTCCTCCCGGGACAGAAA | | GQRAKLTISPDYAY | |
| | CAAGCCCTTTAAGTTTATGCTA | | GATGHPGIIPPHATL | |
| | GGCAAGCAGGAGGTGATCCGA | | VFDVELLKLE | |
| | GGCTGGGAAGAAGGGGTTGCC | | | |
| | CAGATGAGTGTGGGTCAGAGA | | | |
| | GCCAAACTGACTATATCTCCAG | | | |
| | ATTATGCCTATGGTGCCACTGG | | | |
| | GCACCCAGGCATCATCCCACC | | | |
| | ACATGCCACTCTCGTCTTCGAT | | | |
| | GTGGAGCTTCTAAAACTGGAA | | | |
| Linker | CCGCGG | 763 | PR | 764 |
| T2A | GAAGGCCGAGGGAGCCTGCTG | 765 | EGRGSLLTCGDVEE | 766 |
| | ACATGTGGCGATGTGGAGGAA | | NPGP | |
| | AACCCAGGACCA | | | |
| ΔCD19 | ATGCCACCACCTCGCCTGCTG | 767 | MPPPRLLFFLLFLTP | 768 |
| | TTCTTTCTGCTGTTCCTGACAC | | MEVRPEEPLVVKVE | |
| | CTATGGAGGTGCGACCTGAGG | | EGDNAVLQCLKGTS | |
| | AACCACTGGTCGTGAAGGTCG | | DGPTQQLTWSRES | |
| | AGGAAGGCGACAATGCCGTGC | | PLKPFLKLSLGLPGL | |
| | TGCAGTGCCTGAAAGGCACTT | | GIHMRPLAIWLFIFN | |
| | CTGATGGGCCAACTCAGCAGC | | VSQQMGGFYLCQP | |
| | TGACCTGGTCCAGGGAGTCTC | | GPPSEKAWQPGWT | |
| | CCCTGAAGCCTTTTCTGAAACT | | VNVEGSGELFRWN | |
| | GAGCCTGGGACTGCCAGGACT | | VSDLGGLGCGLKNR | |
| | GGGAATCCACATGCGCCCTCT | | SSEGPSSPSGKLMS | |
| | GGCTATCTGGCTGTTCATCTTC | | PKLYVWAKDRPEIW | |
| | AACGTGAGCCAGCAGATGGGA | | EGEPPCLPPRDSLN | |
| | GGATTCTACCTGTGCCAGCCA | | QSLSQDLTMAPGST | |
| | GGACCACCATCCGAGAAGGCC | | LWLSCGVPPDSVSR | |
| | TGGCAGCCTGGATGGACCGTC | | GPLSWWTHVHPKGP | |
| | AACGTGGAGGGGTCTGGAGAA | | KSLLSLELKDDRPA | |
| | CTGTTTAGGTGGAATGTGAGTG | | RDMWVMETGLLLP | |
| | ACCTGGGAGGACTGGGATGTG | | RATAQDAGKYYCH | |
| | GGCTGAAGAACCGCTCCTCTG | | RGNLTMSFHLEITAR | |
| | AAGGCCCAAGTTCACCCTCAG | | PVLWHWLLRTGGW | |
| | GGAAGCTGATGAGCCCAAAAC | | KVSAVTLAYLIFCLC | |
| | TGTACGTGTGGGCCAAAGATC | | SLVGILHLQRALVLR | |
| | GGCCCGAGATCTGGGAGGGAG | | RKRKRMTDPTRRF* | |
| | AACCTCCATGCCTGCCACCTAG | | | |
| | AGACAGCCTGAATCAGAGTCT | | | |
| | GTCACAGGATCTGACAATGGC | | | |
| | CCCCGGGTCCACTCTGTGGCT | | | |
| | GTCTTGTGGAGTCCCACCCGA | | | |
| | CAGCGTGTCCAGAGGCCCTCT | | | |
| | GTCCTGGACCCACGTGCATCC | | | |
| | TAAGGGGCCAAAAAGTCTGCT | | | |
| | GTCACTGGAACTGAAGGACGA | | | |
| | TCGGCCTGCCAGAGACATGTG | | | |
| | GGTCATGGAGACTGGACTGCT | | | |
| | GCTGCCACGAGCAACCGCACA | | | |
| | GGATGCTGGAAAATACTATTGC | | | |
| | CACCGGGGCAATCTGACAATG | | | |
| | TCCTTCCATCTGGAGATCACTG | | | |
| | CAAGGCCCGTGCTGTGGCACT | | | |
| | GGCTGCTGCGAACCGGAGGAT | | | |
| | GGAAGGTCAGTGCTGTGACAC | | | |
| | TGGCATATCTGATCTTTTGCCT | | | |
| | GTGCTCCCTGGTGGGCATTCT | | | |
| | GCATCTGCAGAGAGCCCTGGT | | | |
| | GCTGCGGAGAAAGAGAAAGAG | | | |
| | AATGACTGACCCAACAAGAAG | | | |
| | GTTTTGA | | | |

pBP0607—pSFG-k-iMC.2A-ΔCD19

| | | SEQ ID | | SEQ ID |
|---|---|---|---|---|
| Fragment | Nucleotide | NO: | Peptide | NO: |
| Myr | ATGGGGAGTAGCAAGAGCAAG | 769 | MGSSKSKPKDPSQR | 770 |
| | CCTAAGGACCCCAGCCAGCGC | | | |
| Linker | CTCGAC | 771 | LN | 772 |
| MyD88 | ATGGCTGCAGGAGGTCCCGG | 773 | MAAGGPGAGSAAPV | 774 |
| | CGCGGGGTCTGCGGCCCCGG | | SSTSSLPLAALNMRV | |
| | TCTCCTCCACATCCTCCCTTCC | | RRRLSLFLNVRTQVA | |
| | CCTGGCTGCTCTCAACATGCG | | ADWTALAEEMDFEY | |
| | AGTGCGGCGCCGCCTGTCTCT | | LEIRQLETQADPTGR | |
| | GTTCTTGAACGTGCGGACACA | | LLDAWQGRPGASVG | |
| | GGTGGCGGCCGACTGGACCG | | RLLDLLTKLGRDDVL | |
| | CGCTGGCGGAGGAGATGGAC | | LELGPSIEEDCQKYIL | |
| | TTTGAGTACTTGGAGATCCGG | | KQQQEEAEKPLQVA | |
| | CAACTGGAGACACAAGCGGAC | | AVDSSVPRTAELAGI | |
| | CCCACTGGCAGGCTGCTGGAC | | TTLDDPLGHMPERF | |
| | GCCTGGCAGGGACGCCCTGG | | DAFICYCPSDI | |
| | CGCCTCTGTAGGCCGACTGCT | | | |
| | CGATCTGCTTACCAAGCTGGG | | | |
| | CCGCGACGACGTGCTGCTGGA | | | |
| | GCTGGGACCCAGCATTGAGGA | | | |
| | GGATTGCCAAAAGTATATCTTG | | | |
| | TGAGAAGCCTTTACAGGTGGC | | | |
| | CGCTGTAGACAGCAGTGTCCC | | | |
| | ACGGACAGCAGAGCTGGCGG | | | |
| | GCATCACCACACTTGATGACC | | | |
| | CCCTGGGGCATATGCCTGAGC | | | |
| | GTTTCGATGCCTTCATCTGCTA | | | |
| | TTGCCCCAGCGACATC | | | |
| Linker | GTCGAG | 775 | VG | 776 |
| hCD04 | AAAAAGGTGGCCAAGAAGCCA | 777 | KKVAKKPTNKAPHPK | 778 |
| | ACCAATAAGGCCCCCCACCCC | | QEPQEINFPDDLPGS | |
| | AAGCAGGAGCCCCAGGAGATC | | NTAAPVQETLHGCQ | |
| | AATTTTCCCGACGATCTTCCTG | | PVTQEDGKESRISVQ | |
| | GCTCCAACACTGCTGCTCCAG | | ERQ | |
| | TGCAGGAGACTTTACATGGAT | | | |
| | GCCAACCGGTCACCCAGGAG | | | |
| | GATGGCAAAGAGAGTCGCATC | | | |
| | TCAGTGCAGGAGAGACAG | | | |
| Linker | GTCGAG | 779 | VG | 780 |
| Fv′ | GGCGTCCAAGTCGAAACCATT | 781 | GVQVETISPGDGRTF | 782 |
| | AGTCCCGGCGATGGCAGAACA | | PKRGQTCVVHYTGM | |
| | TTTCCTAAAAGGGGACAAACAT | | LEDGKKVDSSRDRN | |
| | GTGTCGTCCATTATACAGGCAT | | KPFKFMLGKQEVIRG | |
| | GTTGGAGGACGGCAAAAAGGT | | WEEGVAQMSVGQR | |
| | GGACAGTAGTAGAGATCGCAA | | AKLTISPDYAYGATG | |
| | TAAACCTTTCAAATTCATGTTG | | HPGIIPPHATLVFDVE | |
| | GGAAAACAAGAAGTCATTAGG | | LLKLE | |
| | GGATGGGAGGAGGGCGTGGC | | | |
| | TCAAATGTCCGTCGGCCAACG | | | |
| | CGCTAAGCTCACCATCAGCCC | | | |
| | CGACTACGCATACGGCGCTAC | | | |
| | CGGACATCCCGGAATTATTCC | | | |
| | CCCTCACGCTACCTTGGTGTTT | | | |
| | GACGTCGAACTGTTGAAGCTC | | | |
| | GAA | | | |
| Linker | GTCGAG | 783 | VG | 784 |
| Fv | GGAGTGCAGGTGGAGACTATC | 785 | GVQVETISPGDGRTF | 786 |
| | TCCCCAGGAGACGGGCGCAC | | PKRGQTCVVHYTGM | |
| | CTTCCCCAAGCGCGGCCAGAC | | LEDGKKVDSSRDRN | |
| | CTGCGTGGTGCACTACACCGG | | KPFKFMLGKQEVIRG | |
| | GATGCTTGAAGATGGAAAGAA | | WEEGVAQMSVGQR | |
| | AGTTGATTCCTCCCGGGACAG | | AKLTISPDYAYGATG | |
| | AAACAAGCCCTTTAAGTTTATG | | HPGIIPPHATLVFDVE | |
| | CTAGGCAAGCAGGAGGTGATC | | LLKLE | |
| | CGAGGCTGGGAAGAAGGGGT | | | |
| | TGCCCAGATGAGTGTGGGTCA | | | |
| | GAGAGCCAAACTGACTATATCT | | | |
| | CCAGATTATGCCTATGGTGCC | | | |
| | ACTGGGCACCCAGGCATCATC | | | |
| | CCACCACATGCCACTCTCGTC | | | |
| | TTCGATGTGGAGCTTCTAAAAC | | | |
| | TGGAA | | | |
| Linker | CCGCGG | 787 | PR | 788 |
| T2A | GAAGGCCGAGGGAGCCTGCT | 789 | EGRGSLLTCGDVEE | 790 |
| | GACATGTGGCGATGTGGAGGA | | NPGP | |
| | AAACCCAGGACCA | | | |
| ΔCD19 | ATGCCACCACCTCGCCTGCTG | 791 | MPPPRLLFFLLFLTP | 792 |
| | TTCTTTCTGCTGTTCCTGACAC | | MEVRPEEPLVVKVEE | |
| | CTATGGAGGTGCGACCTGAGG | | GDNAVLQCLKGTSD | |
| | AACCACTGGTCGTGAAGGTCG | | GPTQQLTWSRESPL | |
| | AGGAAGGCGACAATGCCGTGC | | KPFLKLSLGLPGLGIH | |
| | TGCAGTGCCTGAAAGGCACTT | | MRPLAIWLFIFNVSQ | |
| | CTGATGGGCCAACTCAGCAGC | | QMGGFYLCQPGPPS | |
| | TGACCTGGTCCAGGGAGTCTC | | EKAWQPGWTVNVE | |
| | CCCTGAAGCCTTTTCTGAAACT | | GSGELFRWNVSDLG | |
| | GAGCCTGGGACTGCCAGGACT | | GLGCGLKNRSSEGP | |
| | GGGAATCCACATGCGCCCTCT | | SSPSGKLMSPKLYV | |
| | GGCTATCTGGCTGTTCATCTTC | | WAKDRPEIWEGEPP | |
| | AACGTGAGCCAGCAGATGGGA | | CLPPRDSLNQSLSQ | |
| | GGATTCTACCTGTGCCAGCCA | | DLTMAPGSTLWLSC | |
| | GGACCACCATCCGAGAAGGCC | | GVPPDSVSRGPLSW | |
| | TGGCAGCCTGGATGGACCGTC | | THVHPKGPKSLLSLE | |
| | AACGTGGAGGGGTCTGGAGAA | | LKDDRPARDMWVME | |
| | CTGTTTAGGTGGAATGTGAGT | | TGLLLPRATAQDAGK | |
| | GACCTGGGAGGACTGGGATGT | | YYCHRGNLTMSFHL | |
| | GGGCTGAAGAACCGCTCCTCT | | EITARPVLWHWLLRT | |
| | GAAGGCCCAAGTTCACCCTCA | | GGWKVSAVTLAYLIF | |
| | GGGAAGCTGATGAGCCCAAAA | | CLCSLVGILHLQRAL | |
| | CTGTACGTGTGGGCCAAAGAT | | VLRRKRKRMTDPTR | |
| | CGGCCCGAGATCTGGGAGGG | | RF* | |
| | AGAACCTCCATGCCTGCCACC | | | |
| | TAGAGACAGCCTGAATCAGAG | | | |
| | TCTGTCACAGGATCTGACAAT | | | |
| | GGCCCCCGGGTCCACTCTGTG | | | |
| | GCTGTCTTGTGGAGTCCCACC | | | |
| | CGACAGCGTGTCCAGAGGCCC | | | |
| | TCTGTCCTGGACCCACGTGCA | | | |
| | TCCTAAGGGGCCAAAAAGTCT | | | |
| | GCTGTCACTGGAACTGAAGGA | | | |
| | CGATCGGCCTGCCAGAGACAT | | | |
| | GTGGGTCATGGAGACTGGACT | | | |
| | GCTGCTGCCACGAGCAACCGC | | | |
| | ACAGGATGCTGGAAAATACTAT | | | |
| | TGCCACCGGGGCAATCTGACA | | | |
| | ATGTCCTTCCATCTGGAGATCA | | | |
| | CTGCAAGGCCCGTGCTGTGGC | | | |
| | ACTGGCTGCTGCGAACCGGAG | | | |
| | GATGGAAGGTCAGTGCTGTGA | | | |
| | CACTGGCATATCTGATCTTTTG | | | |
| | CCTGTGCTCCCTGGTGGGCAT | | | |
| | TCTGCATCTGCAGAGAGCCCT | | | |
| | GGTGCTGCGGAGAAAGAGAAA | | | |
| | GAGAATGACTGACCCAACAAG | | | |
| | AAGGTTTTGA | | | |

pBP0668—pSFG-FRB_{I}x2.Caspase9.2A-Q.8stm.CD3zeta

| | | SEQ ID | | SEQ ID |
|---|---|---|---|---|
| Fragment | Nucleotide | NO: | Peptide | NO: |
| FRB_{I}′ | TGGCATGAAGGCCTGGAAGAG | 793 | WHEGLEEASRLYFG | 794 |
| | GCATCTCGTTTGTACTTTGGGG | | ERNVKGMFEVLEPL | |
| | AAAGGAACGTGAAAGGCATGTT | | HAMMERGPQTLKET | |
| | TGAGGTGCTGGAGCCCTTGCA | | SFNQAYGRDLMEAQ | |
| | CGCTATGATGGAACGGGGCCC | | EWCRKYMKSGNVKD | |
| | CCAGACTCTGAAGGAAACATCC | | LLQAWDLYYHVFRRI | |
| | TTTAATCAGGCCTATGGTCGAG | | SK | |
| | ATTTAATGGAGGCCCAAGAGTG | | | |
| | GTGCAGGAAGTACATGAAATCA | | | |
| | GGGAATGTCAAGGACCTCCTC | | | |
| | CAAGCCTGGGACCTCTATTATC | | | |
| | ATGTGTTCCGACGAATCTCAAA | | | |
| | G | | | |
| Linker | GTCGAG | 795 | VG | 796 |
| FRB_{I} | TGGCATGAAGGGTTGGAAGAA | 797 | WHEGLEEASRLYFG | 798 |
| | GCTTCAAGGCTGTACTTCGGA | | ERNVKGMFEVLEPL | |
| | GAGAGGAACGTGAAGGGCATG | | HAMMERGPQTLKET | |
| | TTTGAGGTTCTTGAACCTCTGC | | SFNQAYGRDLMEAQ | |
| | ACGCCATGATGGAACGGGGAC | | EWCRKYMKSGNVKD | |
| | CGCAGACACTGAAAGAAACCT | | LLQAWDLYYHVFRRI | |
| | CTTTTAATCAGGCCTACGGCAG | | SK | |
| | AGACCTGATGGAGGCCCAAGA | | | |
| | ATGGTGTAGAAAGTATATGAAA | | | |
| | TCCGGTAACGTGAAAGACCTG | | | |
| | CTCCAGGCCTGGGACCTTTATT | | | |
| | ACCATGTGTTCAGGCGGATCA | | | |
| | GTAAG | | | |
| Linker | TCAGGCGGTGGCTCAGGT | 799 | SGGGSG | 800 |
| Δ | TCGACGGATTTGGTGATGTCG | 801 | DGFGDVGALESLRG | 802 |
| Caspase9 | GTGCTCTTGAGAGTTTGAGGG | | NADLAYILSMEPCGH | |
| | GAAATGCAGATTTGGCTTACAT | | CLIINNVNFCRESGLR | |
| | CCTGAGCATGGAGCCCTGTGG | | TRTGSNIDCEKLRRR | |
| | CCACTGCCTCATTATCAACAAT | | FSSLHFMVEVKGDLT | |
| | GTGAACTTCTGCCGTGAGTCC | | AKKMVLALLELARQD | |
| | GGGCTCCGCACCCGCACTGGC | | HGALDCCVVVILSHG | |
| | TCCAACATCGACTGTGAGAAGT | | CQASHLQFPGAVYG | |
| | TGCGGCGTCGCTTCTCCTCGC | | TDGCPVSVEKIVNIFN | |
| | TGCATTTCATGGTGGAGGTGAA | | GTSCPSLGGKPKLFF | |
| | GGGCGACCTGACTGCCAAGAA | | IQACGGEQKDHGFE | |
| | AATGGTGCTGGCTTTGCTGGA | | VASTSPEDESPGSN | |
| | GCTGGCGCGGCAGGACCACG | | PEPDATPFQEGLRTF | |
| | GTGCTCTGGACTGCTGCGTGG | | DQLDAISSLPTPSDIF | |
| | TGGTCATTCTCTCTCACGGCTG | | VSYSTFPGFVSWRD | |
| | TCAGGCCAGCCACCTGCAGTT | | PKSGSVVYVETLDDIF | |
| | CCCAGGGGCTGTCTACGGCAC | | EQWAHSEDLQSLLL | |
| | AGATGGATGCCCTGTGTCGGT | | RVANAVSVKGIYKQM | |
| | CGAGAAGATTGTGAACATCTTC | | PGCFNFLRKKLFFKT | |
| | AATGGGACCAGCTGCCCCAGC | | SASRA | |
| | CTGGGAGGGAAGCCCAAGCTC | | | |
| | TTTTTCATCCAGGCCTGTGGTG | | | |
| | GGGAGCAGAAAGACCATGGGT | | | |
| | TTGAGGTGGCCTCCACTTCCC | | | |
| | CTGAAGACGAGTCCCCTGGCA | | | |
| | GTAACCCCGAGCCAGATGCCA | | | |
| | CCCCGTTCCAGGAAGGTTTGA | | | |
| | GGACCTTCGACCAGCTGGACG | | | |
| | CCATATCTAGTTTGCCCACACC | | | |
| | CAGTGACATCTTTGTGTCCTAC | | | |
| | TCTACTTTCCCAGGTTTTGTTTC | | | |
| | CTGGAGGGACCCCAAGAGTGG | | | |
| | CTCCTGGTACGTTGAGACCCT | | | |
| | GGACGACATCTTTGAGCAGTG | | | |
| | GGCTCACTCTGAAGACCTGCA | | | |
| | GTCCCTCCTGCTTAGGGTCGC | | | |
| | TAATGCTGTTTCGGTGAAAGGG | | | |
| | ATTTATAAACAGATGCCTGGTT | | | |
| | GCTTTAATTTCCTCCGGAAAAA | | | |
| | ACTTTTCTTTAAAACATCAGCTA | | | |
| | GCAGAGCC | | | |
| Linker | CCGCGG | 803 | PR | 804 |
| T2A | GAAGGCCGAGGGAGCCTGCTG | 805 | EGRGSLLTCGDVEE | 806 |
| | ACATGTGGCGATGTGGAGGAA | | NPGP | |
| | AACCCAGGACCA | | | |
| Signal | ATGGAATTTGGCCTCTCCTGGT | 807 | MEFGLSWLFLVAILK | 808 |
| Peptide | TGTTTCTCGTGGCCATTCTTAA | | GVQCSR | |
| | GGGTGTGCAGTGCTCCAGA | | | |
| Linker | ATGCAT | 809 | MH | 810 |
| Q- | GAACTTCCTACTCAGGGGACTT | 811 | ELPTQGTFSNVSTNV | 812 |
| Bend | TCTCAAACGTTAGCACAAACGT | | S | |
| (CD34 | AAGT | | | |
| Epitope) | | | | |
| CD8 | CCCGCCCCAAGACCCCCCACA | 813 | PAPRPPTPAPTIASQ | 814 |
| Stalk | CCTGCGCCGACCATTGCTTCTC | | PLSLRPEACRPAAG | |
| | AACCCCTGAGTTTGAGACCCG | | GAVHTRGLDFACD | |
| | AGGCCTGCCGGCCAGCTGCCG | | | |
| | GCGGGGCCGTGCATACAAGAG | | | |
| | GACTCGATTTCGCTTGCGAC | | | |
| CD8atm | ATCTATATCTGGGCACCTCTCG | 815 | IYIWAPLAGTCGVLLL | 816 |
| | CTGGCACCTGTGGAGTCCTTCT | | SLVITLYCNHRNRRR | |
| | GCTCAGCCTGGTTATTACTCTG | | VCKCPRVD | |
| | TACTGTAATCACCGGAATCGCC | | | |
| | GCCGCGTTTGTAAGTGTCCCA | | | |
| | GGGTCGAC | | | |
| CD3 | AGAGTGAAGTTCAGCAGGAGC | 817 | RVKFSRSADAPAYQ | 818 |
| zeta | GCAGACGCCCCCGCGTACCAG | | QGQNQLYNELNLGR | |
| | CAGGGCCAGAACCAGCTCTAT | | REEYDVLDKRRGRD | |
| | AACGAGCTCAATCTAGGACGAA | | PEMGGKPRRKNPQE | |
| | GAGAGGAGTACGATGTTTTGG | | GLYNELQKDKMAEA | |
| | ACAAGAGACGTGGCCGGGACC | | YSEIGMKGERRRGK | |
| | CTGAGATGGGGGGAAAGCCGA | | GHDGLYQGLSTATK | |
| | GAAGGAAGAACCCTCAGGAAG | | DTYDALHMQALPP | |
| | GCCTGTACAATGAACTGCAGAA | | | |
| | AGATAAGATGGCGGAGGCCTA | | | |
| | CAGTGAGATTGGGATGAAAGG | | | |
| | CGAGCGCCGGAGGGGCAAGG | | | |
| | GGCACGATGGCCTTTACCAGG | | | |
| | GTCTCAGTACAGCCACCAAGG | | | |
| | ACACCTACGACGCCCTTCACAT | | | |
| | GCAAGCTCTTCCACCTCG | | | |

pBP0608—pSFG-ΔMyr.iMC.2A-ΔCD19.Q.8stm.CD3zeta

| | | SEQ ID | | SEQ ID |
|---|---|---|---|---|
| Fragment | Nucleotide | NO: | Peptide | NO: |
| MyD88 | ATGGCTGCAGGAGGTCCCGGC | 819 | MAAGGPGAGSAAPV | 820 |
| | GCGGGGTCTGCGGCCCCGGT | | SSTSSLPLAALNMRV | |
| | CTCCTCCACATCCTCCCTTCCC | | RRRLSLFLNVRTQVA | |
| | CTGGCTGCTCTCAACATGCGA | | ADVVTALAEEMDFEY | |
| | GTGCGGCGCCGCCTGTCTCTG | | LEIRQLETQADPTGR | |
| | TTCTTGAACGTGCGGACACAG | | LLDAWQGRPGASVG | |
| | GTGGCGGCCGACTGGACCGC | | RLLDLLTKLGRDDVL | |
| | GCTGGCGGAGGAGATGGACTT | | LELGPSIEEDCQKYIL | |
| | TGAGTACTTGGAGATCCGGCA | | KQQQEEAEKPLQVA | |
| | ACTGGAGACACAAGCGGACCC | | AVDSSVPRTAELAGI | |
| | CACTGGCAGGCTGCTGGACGC | | TTLDDPLGHMPERF | |
| | CTGGCAGGGACGCCCTGGCGC | | DAFICYCPSDI | |
| | CTCTGTAGGCCGACTGCTCGA | | | |
| | TCTGCTTACCAAGCTGGGCCG | | | |
| | CGACGACGTGCTGCTGGAGCT | | | |
| | GGGACCCAGCATTGAGGAGGA | | | |
| | TTGCCAAAAGTATATCTTGAAG | | | |
| | CAGCAGCAGGAGGAGGCTGAG | | | |
| | AAGCCTTTACAGGTGGCCGCT | | | |
| | GTAGACAGCAGTGTCCCACGG | | | |
| | ACAGCAGAGCTGGCGGGCATC | | | |
| | ACCACACTTGATGACCCCCTG | | | |
| | GGGCATATGCCTGAGCGTTTC | | | |
| | GATGCCTTCATCTGCTATTGCC | | | |
| | CCAGCGACATC | | | |
| Linker | GTCGAG | 821 | VE | 822 |
| hCD40 | AAAAAGGTGGCCAAGAAGCCA | 823 | KKVAKKPTNKAPHPK | 824 |
| | ACCAATAAGGCCCCCCACCCC | | QEPQEINFPDDLPGS | |
| | AAGCAGGAGCCCCAGGAGATC | | NTAAPVQETLHGCQ | |
| | AATTTTCCCGACGATCTTCCTG | | PVTQEDGKESRISVQ | |
| | GCTCCAACACTGCTGCTCCAGT | | ERQ | |
| | GCAGGAGACTTTACATGGATG | | | |
| | CCAACCGGTCACCCAGGAGGA | | | |
| | TGGCAAAGAGAGTCGCATCTC | | | |
| | AGTGCAGGAGAGACAG | | | |
| Linker | GTCGAG | 825 | VE | 826 |
| Fv′ | GGCGTCCAAGTCGAAACCATTA | 827 | GVQVETISPGDGRTF | 828 |
| | GTCCCGGCGATGGCAGAACAT | | PKRGQTCVVHYTGM | |
| | TTCCTAAAAGGGGACAAACATG | | LEDGKKVDSSRDRN | |
| | TGTCGTCCATTATACAGGCATG | | KPFKFMLGKQEVIRG | |
| | TTGGAGGACGGCAAAAAGGTG | | WEEGVAQMSVGQR | |
| | GACAGTAGTAGAGATCGCAATA | | AKLTISPDYAYGATG | |
| | AACCTTTCAAATTCATGTTGGG | | HPGIIPPHATLVFDVE | |
| | AAAACAAGAAGTCATTAGGGGA | | LLKLE | |
| | TGGGAGGAGGGCGTGGCTCAA | | | |
| | ATGTCCGTCGGCCAACGCGCT | | | |
| | AAGCTCACCATCAGCCCCGAC | | | |
| | TACGCATACGGCGCTACCGGA | | | |
| | CATCCCGGAATTATTCCCCCTC | | | |
| | ACGCTACCTTGGTGTTTGACGT | | | |
| | CGAACTGTTGAAGCTCGAA | | | |
| Linker | GTCGAG | 829 | VE | 830 |
| Fv | GGAGTGCAGGTGGAGACTATC | 831 | GVQVETISPGDGRTF | 832 |
| | TCCCCAGGAGACGGGCGCACC | | PKRGQTCVVHYTGM | |
| | TTCCCCAAGCGCGGCCAGACC | | LEDGKKVDSSRDRN | |
| | TGCGTGGTGCACTACACCGGG | | KPFKFMLGKQEVIRG | |
| | ATGCTTGAAGATGGAAAGAAAG | | WEEGVAQMSVGQR | |
| | TTGATTCCTCCCGGGACAGAAA | | AKLTISPDYAYGATG | |
| | CAAGCCCTTTAAGTTTATGCTA | | HPGIIPPHATLVFDVE | |
| | GGCAAGCAGGAGGTGATCCGA | | LLKLE | |
| | GGCTGGGAAGAAGGGGTTGCC | | | |
| | CAGATGAGTGTGGGTCAGAGA | | | |
| | GCCAAACTGACTATATCTCCAG | | | |
| | ATTATGCCTATGGTGCCACTGG | | | |
| | GCACCCAGGCATCATCCCACC | | | |
| | ACATGCCACTCTCGTCTTCGAT | | | |
| | GTGGAGCTTCTAAAACTGGAA | | | |
| Linker | CCGCGG | 833 | PR | 834 |
| T2A | GAAGGCCGAGGGAGCCTGCTG | 835 | EGRGSLLTCGDVEE | 836 |
| | ACATGTGGCGATGTGGAGGAA | | NPGP | |
| | AACCCAGGACCA | | | |
| Linker | CCATGG | 837 | PW | 838 |
| Signal | ATGGAGTTTGGACTTTCTTGGT | 839 | MEFGLSWLFLVAILK | 840 |
| Peptide | TGTTTTTGGTGGCAATTCTGAA | | GVQCSR | |
| | GGGTGTCCAGTGTAGCAGG | | | |
| FMC | GACATCCAGATGACACAGACTA | 841 | DIQMTQTTSSLSASL | 842 |
| 63-VL | CATCCTCCCTGTCTGCCTCTCT | | GDRVTISCRASQDIS | |
| | GGGAGACAGAGTCACCATCAG | | KYLNVVYQQKPDGTV | |
| | TTGCAGGGCAAGTCAGGACAT | | KLLIYHTSRLHSGVP | |
| | TAGTAAATATTTAAATTGGTATC | | SRFSGSGSGTDYSL | |
| | AGCAGAAACCAGATGGAACTG | | TISNLEQEDIATYFCQ | |
| | TTAAACTCCTGATCTACCATAC | | QGNTLPYTFGGGTK | |
| | ATCAAGATTACACTCAGGAGTC | | LEIT | |
| | CCATCAAGGTTCAGTGGCAGT | | | |
| | GGGTCTGGAACAGATTATTCTC | | | |
| | TCACCATTAGCAACCTGGAGCA | | | |
| | AGAAGATATTGCCACTTACTTT | | | |
| | TGCCAACAGGGTAATACGCTTC | | | |
| | CGTACACGTTCGGAGGGGGGA | | | |
| | CTAAGTTGGAAATAACA | | | |
| Flex | GGCGGAGGAAGCGGAGGTGG | 843 | GGGSGGGG | 844 |
| Linker | GGGC | | | |
| FMC | GAGGTGAAACTGCAGGAGTCA | 845 | EVKLQESGPGLVAPS | 846 |
| 63-VH | GGACCTGGCCTGGTGGCGCCC | | QSLSVTCTVSGVSLP | |
| | TCACAGAGCCTGTCCGTCACAT | | DYGVSWIRQPPRKG | |
| | GCACTGTCTCAGGGGTCTCATT | | LEWLGVIWGSETTYY | |
| | ACCCGACTATGGTGTAAGCTG | | NSALKSRLTIIKDNSK | |
| | GATTCGCCAGCCTCCACGAAA | | SQVFLKMNSLQTDD | |
| | GGGTCTGGAGTGGCTGGGAGT | | TAIYYCAKHYYYGGS | |
| | AATATGGGGTAGTGAAACCACA | | YAMDYWGQGTSVTV | |
| | TACTATAATTCAGCTCTCAAATC | | SS | |
| | CAGACTGACCATCATCAAGGAC | | | |
| | AACTCCAAGAGCCAAGTTTTCT | | | |
| | TAAAAATGAACAGTCTGCAAAC | | | |
| | TGATGACACAGCCATTTACTAC | | | |
| | TGTGCCAAACATTATTACTACG | | | |
| | GTGGTAGCTATGCTATGGACTA | | | |
| | CTGGGGTCAAGGAACCTCAGT | | | |
| | CACCGTCTCCTCA | | | |
| Linker | GGATCC | 847 | GS | 848 |
| Q- | GAACTTCCTACTCAGGGGACTT | 849 | ELPTQGTFSNVSTNV | 850 |
| Bend | TCTCAAACGTTAGCACAAACGT | | S | |
| (CD34 | AAGT | | | |
| Epitope) | | | | |
| CD8 | CCCGCCCCAAGACCCCCCACA | 851 | PAPRPPTPAPTIASQ | 852 |
| Stalk | CCTGCGCCGACCATTGCTTCTC | | PLSLRPEACRPAAG | |
| | AACCCCTGAGTTTGAGACCCG | | GAVHTRGLDFACD | |
| | AGGCCTGCCGGCCAGCTGCCG | | | |
| | GCGGGGCCGTGCATACAAGAG | | | |
| | GACTCGATTTCGCTTGCGAC | | | |
| CD8atm | ATCTATATCTGGGCACCTCTCG | 853 | IYIWAPLAGTCGVLLL | 854 |
| | CTGGCACCTGTGGAGTCCTTCT | | SLVITLYCNHNRRR | |
| | GCTCAGCCTGGTTATTACTCTG | | VCKCPR | |
| | TACTGTAATCACCGGAATCGCC | | | |
| | GCCGCGTTTGTAAGTGTCCCA | | | |
| | GG | | | |
| Linker | GTCGAC | 855 | VD | 856 |
| CD3 | AGAGTGAAGTTCAGCAGGAGC | 857 | RVKFSRSADAPAYQ | 858 |
| zeta | GCAGACGCCCCCGCGTACCAG | | QGQNQLYNELNLGR | |
| | CAGGGCCAGAACCAGCTCTAT | | REEYDVLDKRRGRD | |
| | AACGAGCTCAATCTAGGACGAA | | PEMGGKPRRKNPQE | |
| | GAGAGGAGTACGATGTTTTGG | | GLYNELQKDKMAEA | |
| | ACAAGAGACGTGGCCGGGACC | | YSEIGMKGERRRGK | |
| | CTGAGATGGGGGGAAAGCCGA | | GHDGLYQGLSTATK | |
| | GAAGGAAGAACCCTCAGGAAG | | DTYDALHMQALPP | |
| | GCCTGTACAATGAACTGCAGAA | | | |
| | AGATAAGATGGCGGAGGCCTA | | | |
| | CAGTGAGATTGGGATGAAAGG | | | |
| | CGAGCGCCGGAGGGGCAAGG | | | |
| | GGCACGATGGCCTTTACCAGG | | | |
| | GTCTCAGTACAGCCACCAAGG | | | |
| | ACACCTACGACGCCCTTCACAT | | | |
| | GCAAGCTCTTCCACCTCG | | | |

pBP0609: pSFG-iMC.2A-ΔCD19.Q.8stm.CD3zeta

| | | SEQ ID | | SEQ ID |
|---|---|---|---|---|
| Fragment | Nucleotide | NO: | Peptide | NO: |
| Myr | ATGGGGAGTAGCAAGAGCAAG | 859 | MGSSKSKPKDPSQR | 860 |
| | CCTAAGGACCCCAGCCAGCGC | | | |
| Linker | CTCGAC | 861 | LD | 862 |
| MyD88 | ATGGCTGCAGGAGGTCCCGGC | 863 | MAAGGPGAGSAAPV | 864 |
| | GCGGGGTCTGCGGCCCCGGT | | SSTSSLPLAALNMRV | |
| | CTCCTCCACATCCTCCCTTCCC | | RRRLSLFLNVRTQVA | |
| | CTGGCTGCTCTCAACATGCGA | | ADVVTALAEEMDFEY | |
| | GTGCGGCGCCGCCTGTCTCTG | | LEIRQLETQADPTGR | |
| | TTCTTGAACGTGCGGACACAG | | LLDAWQGRPGASVG | |
| | GTGGCGGCCGACTGGACCGC | | RLLDLLTKLGRDDVL | |
| | GCTGGCGGAGGAGATGGACTT | | LELGPSIEEDCQKYIL | |
| | TGAGTACTTGGAGATCCGGCA | | KQQQEEAEKPLQVA | |
| | ACTGGAGACACAAGCGGACCC | | AVDSSVPRTAELAGI | |
| | CACTGGCAGGCTGCTGGACGC | | TTLDDPLGHMPERF | |
| | CTGGCAGGGACGCCCTGGCGC | | DAFICYCPSDI | |
| | CTCTGTAGGCCGACTGCTCGA | | | |
| | TCTGCTTACCAAGCTGGGCCG | | | |
| | CGACGACGTGCTGCTGGAGCT | | | |
| | GGGACCCAGCATTGAGGAGGA | | | |
| | TTGCCAAAAGTATATCTTGAAG | | | |
| | CAGCAGCAGGAGGAGGCTGAG | | | |
| | AAGCCTTTACAGGTGGCCGCT | | | |
| | GTAGACAGCAGTGTCCCACGG | | | |
| | ACAGCAGAGCTGGCGGGCATC | | | |
| | ACCACACTTGATGACCCCCTG | | | |
| | GGGCATATGCCTGAGCGTTTC | | | |
| | GATGCCTTCATCTGCTATTGCC | | | |
| | CCAGCGACATC | | | |
| Linker | GTCGAG | 865 | VE | 866 |
| hCD40 | AAAAAGGTGGCCAAGAAGCCA | 867 | KKVAKKPTNKAPHPK | 868 |
| | ACCAATAAGGCCCCCCACCCC | | QEPQEINFPDDLPGS | |
| | AAGCAGGAGCCCCAGGAGATC | | NTAAPVQETLHGCQ | |
| | AATTTTCCCGACGATCTTCCTG | | PVTQEDGKESRISVQ | |
| | GCTCCAACACTGCTGCTCCAGT | | ERQ | |
| | GCAGGAGACTTTACATGGATG | | | |
| | CCAACCGGTCACCCAGGAGGA | | | |
| | TGGCAAAGAGAGTCGCATCTC | | | |
| | AGTGCAGGAGAGACAG | | | |
| Linker | GTCGAG | 869 | VE | 870 |
| Fv′ | GGCGTCCAAGTCGAAACCATTA | 871 | GVQVETISPGDGRTF | 872 |
| | GTCCCGGCGATGGCAGAACAT | | PKRGQTCVVHYTGM | |
| | TTCCTAAAAGGGGACAAACATG | | LEDGKKVDSSRDRN | |
| | TGTCGTCCATTATACAGGCATG | | KPFKFMLGKQEVIRG | |
| | TTGGAGGACGGCAAAAAGGTG | | WEEGVAQMSVGQR | |
| | GACAGTAGTAGAGATCGCAATA | | AKLTISPDYAYGATG | |
| | AACCTTTCAAATTCATGTTGGG | | HPGIIPPHATLVFDVE | |
| | AAAACAAGAAGTCATTAGGGGA | | LLKLE | |
| | TGGGAGGAGGGCGTGGCTCAA | | | |
| | ATGTCCGTCGGCCAACGCGCT | | | |
| | AAGCTCACCATCAGCCCCGAC | | | |
| | TACGCATACGGCGCTACCGGA | | | |
| | CATCCCGGAATTATTCCCCCTC | | | |
| | ACGCTACCTTGGTGTTTGACGT | | | |
| | CGAACTGTTGAAGCTCGAA | | | |
| Linker | GTCGAG | 873 | VE | 874 |
| Fv | GGAGTGCAGGTGGAGACTATC | 875 | GVQVETISPGDGRTF | 876 |
| | TCCCCAGGAGACGGGCGCACC | | PKRGQTCVVHYTGM | |
| | TTCCCCAAGCGCGGCCAGACC | | LEDGKKVDSSRDRN | |
| | TGCGTGGTGCACTACACCGGG | | KPFKFMLGKQEVIRG | |
| | ATGCTTGAAGATGGAAAGAAAG | | WEEGVAQMSVGQR | |
| | TTGATTCCTCCCGGGACAGAAA | | AKLTISPDYAYGATG | |
| | CAAGCCCTTTAAGTTTATGCTA | | HPGIIPPHATLVFDVE | |
| | GGCAAGCAGGAGGTGATCCGA | | LLKLE | |
| | GGCTGGGAAGAAGGGGTTGCC | | | |
| | CAGATGAGTGTGGGTCAGAGA | | | |
| | GCCAAACTGACTATATCTCCAG | | | |
| | ATTATGCCTATGGTGCCACTGG | | | |
| | GCACCCAGGCATCATCCCACC | | | |
| | ACATGCCACTCTCGTCTTCGAT | | | |
| | GTGGAGCTTCTAAAACTGGAA | | | |
| Linker | CCGCGG | 877 | PR | 878 |
| T2A | GAAGGCCGAGGGAGCCTGCTG | 879 | EGRGSLLTCGDVEE | 880 |
| | ACATGTGGCGATGTGGAGGAA | | NPGP | |
| | AACCCAGGACCA | | | |
| Linker | CCATGG | 881 | PW | 882 |
| Signal | ATGGAGTTTGGACTTTCTTGGT | 883 | MEFGLSWLFLVAILK | 884 |
| Peptide | TGTTTTTGGTGGCAATTCTGAA | | GVQCSR | |
| | GGGTGTCCAGTGTAGCAGG | | | |
| FMC | GACATCCAGATGACACAGACTA | 885 | DIQMTQTTSSLSASL | 886 |
| 63- | CATCCTCCCTGTCTGCCTCTCT | | GDRVTISCRASQDIS | |
| VL | GGGAGACAGAGTCACCATCAG | | KYLNVVYQQKPDGTV | |
| | TTGCAGGGCAAGTCAGGACAT | | KLLIYHTSRLHSGVP | |
| | TAGTAAATATTTAAATTGGTATC | | SRFSGSGSGTDYSL | |
| | AGCAGAAACCAGATGGAACTG | | TISNLEQEDIATYFCQ | |
| | TTAAACTCCTGATCTACCATAC | | QGNTLPYTFGGGTK | |
| | ATCAAGATTACACTCAGGAGTC | | LEIT | |
| | CCATCAAGGTTCAGTGGCAGT | | | |
| | GGGTCTGGAACAGATTATTCTC | | | |
| | TCACCATTAGCAACCTGGAGCA | | | |
| | AGAAGATATTGCCACTTACTTT | | | |
| | TGCCAACAGGGTAATACGCTTC | | | |
| | CGTACACGTTCGGAGGGGGGA | | | |
| | CTAAGTTGGAAATAACA | | | |
| Flex | GGCGGAGGAAGCGGAGGTGG | 887 | GGGSGGGG | 888 |
| Linker | GGGC | | | |
| FMC | GAGGTGAAACTGCAGGAGTCA | 889 | EVKLQESGPGLVAPS | 890 |
| 63- | GGACCTGGCCTGGTGGCGCCC | | QSLSVTCTVSGVSLP | |
| VH | TCACAGAGCCTGTCCGTCACAT | | DYGVSWIRQPPRKG | |
| | GCACTGTCTCAGGGGTCTCATT | | LEWLGVIWGSETTYY | |
| | ACCCGACTATGGTGTAAGCTG | | NSALKSRLTIIKDNSK | |
| | GATTCGCCAGCCTCCACGAAA | | SQVFLKMNSLQTDD | |
| | GGGTCTGGAGTGGCTGGGAGT | | TAIYYCAKHYYYGGS | |
| | AATATGGGGTAGTGAAACCACA | | YAMDYWGQGTSVTV | |
| | TACTATAATTCAGCTCTCAAATC | | SS | |
| | CAGACTGACCATCATCAAGGAC | | | |
| | AACTCCAAGAGCCAAGTTTTCT | | | |
| | TAAAAATGAACAGTCTGCAAAC | | | |
| | TGATGACACAGCCATTTACTAC | | | |
| | TGTGCCAAACATTATTACTACG | | | |
| | GTGGTAGCTATGCTATGGACTA | | | |
| | CTGGGGTCAAGGAACCTCAGT | | | |
| | CACCGTCTCCTCA | | | |
| Linker | GGATCC | 891 | GS | 892 |
| Q- | GAACTTCCTACTCAGGGGACTT | 893 | ELPTQGTFSNVSTNV | 894 |
| Bend | TCTCAAACGTTAGCACAAACGT | | S | |
| (CD34 | AAGT | | | |
| Epitope) | | | | |
| CD8 | CCCGCCCCAAGACCCCCCACA | 895 | PAPRPPTPAPTIASQ | 896 |
| Stalk | CCTGCGCCGACCATTGCTTCTC | | PLSLRPEACRPAAG | |
| | AACCCCTGAGTTTGAGACCCG | | GAVHTRGLDFACD | |
| | AGGCCTGCCGGCCAGCTGCCG | | | |
| | GCGGGGCCGTGCATACAAGAG | | | |
| | GACTCGATTTCGCTTGCGAC | | | |
| CD8atm | ATCTATATCTGGGCACCTCTCG | 897 | IYIWAPLAGTCGVLLL | 898 |
| | CTGGCACCTGTGGAGTCCTTCT | | SLVITLYCNHRNRRR | |
| | GCTCAGCCTGGTTATTACTCTG | | VCKCPR | |
| | TACTGTAATCACCGGAATCGCC | | | |
| | GCCGCGTTTGTAAGTGTCCCA | | | |
| | GG | | | |
| Linker | GTCGAC | 899 | VD | 900 |
| CD3 | AGAGTGAAGTTCAGCAGGAGC | 901 | RVKFSRSADAPAYQ | 902 |
| zeta | GCAGACGCCCCCGCGTACCAG | | QGQNQLYNELNLGR | |
| | CAGGGCCAGAACCAGCTCTAT | | REEYDVLDKRRGRD | |
| | AACGAGCTCAATCTAGGACGAA | | PEMGGKPRRKNPQE | |
| | GAGAGGAGTACGATGTTTTGG | | GLYNELQKDKMAEA | |
| | ACAAGAGACGTGGCCGGGACC | | YSEIGMKGERRRGK | |
| | CTGAGATGGGGGGAAAGCCGA | | GHDGLYQGLSTATK | |
| | GAAGGAAGAACCCTCAGGAAG | | DTYDALHMQALPP | |
| | GCCTGTACAATGAACTGCAGAA | | | |
| | AGATAAGATGGCGGAGGCCTA | | | |
| | CAGTGAGATTGGGATGAAAGG | | | |
| | CGAGCGCCGGAGGGGCAAGG | | | |
| | GGCACGATGGCCTTTACCAGG | | | |
| | GTCTCAGTACAGCCACCAAGG | | | |
| | ACACCTACGACGCCCTTCACAT | | | |
| | GCAAGCTCTTCCACCTCG | | | |

### Example 24

### An Inducible Cell Death Switch Directed by Heterodimerizing Ligands

[0696] Materials and Equipment

| Product | Specifications | Company | Catalog # |
|---|---|---|---|
| D-PBS | US Certified | Sigma-Aldrich | D8537 |
| DMEM 4500 | NA | Sigma-Aldrich | D5796 |
| FBS | Clinical | GIBCO | 26140-079 |
| | grade | | |
| 96-well plate | NA | Greiner | 655180 |
| DMEM | NA | Sigma-Aldrich | D5796 |
| Rapamycin | Res. Grade | LC Labs | R5000 |
| Penicillin- | NA | Sigma | P0781 |
| Streptomycin | | | |
| 96-well plate | NA | Greiner | 655076 |
| black | | | |
| L-Glutamine | NA | Sigma-Aldrich | G7513 |
| 293-T cells | Sterile | ATCC | CRL-3216 |
| 4-Methyl- | NA | Sigma | M8168 |
| umbelliferyl- | | | |
| phosphate | | | |
| (4-MUP) | | | |
| Diethanolamine | NA | Sigma | D8885 |
| GeneJuice | NA | Novagen | 70967 |
| Trypsin-EDTA | NA | Sigma-Aldrich | T4049 |
| AP1903/Rimiducid | NA | Bellicum | NA |
| Isopropoxyl- | NA | Bellicum | NA |
| rapamycin | | | |
| OPTIMEM | NA | GIBCO | 31985-070 |
| Silica gel | NA | Sigma | 288624 |
| Ethyl acetate | NA | Sigma | 650528 |
| Hexanes | NA | Sigma | 227064 |
| p-toluene | NA | Sigma | T35920 |
| sulfonic acid | | | |

| | Specifi- | | | |
|---|---|---|---|---|
| Item | cations | Company | Model | Serial # |
| Centrifuge | NA | Thermo | Sorval | 75004538 |
| | | Scientific | Legend | |
| | | | XFR | |
| Micro- | NA | Thermo | Sorval | 75002435 |
| centrifuge | | Scientific | Micro 21 | |
| Spectro- | NA | Thermo | Nanodrop | G900 |
| photometer | | | 2000 | |
| Fluorescence | NA | BMG | Polaris | 415 1361 |
| plate reader | | Labtek | Omega | |

### Methods

### Transfection of Cells

[0697] HEK 293T cells (5×10⁵) were seeded on a 100-mm tissue culture dish in 10 mL DMEM4500, supplemented with glutamine, penicillin/streptomycin and 10% fetal calf serum. After 16-30 hours incubation, cells were transfected using Novagen's GeneJuice® protocol. Briefly, for each transfection, 0.5 mL OptiMEM was pipeted into a 1.5-mL microcentrifuge tube and 15 μL GeneJuice reagent added followed by 5 sec. vortexing. Samples were rested 5 minutes to settle the GeneJuice suspension. DNA (5 μg total) was added to each tube and mixed by pipetting up and down four times. Samples were allowed to rest for 5 minutes for GeneJuice-DNA complex formation and the suspension added dropwise to one dish of 293T cells. A typical transfection contains 1 μg SRα-SEAP (pBP0046) (2), 2 μg FRB-Caspase-9 (pBP0463) and 2 μg FKBPv12-Caspase-9 (pBP0044) (7).

Stimulation of Cells with Dimerizing Drugs

[0698] 24 hours following transfection (4.1), 293T cells were split to 96-well plates and incubated with dilutions of dimerizing drugs. Briefly, 100 μL media was added to each well of a 96-well flat-bottom plate. Drugs were diluted in tubes to a concentration 4× the top concentration in the gradient to be place on the plate. 100 μL of dimerizing ligand (rimiducid, rapamycin, isopropoxylrapamycin) was added to each of three wells on the far right of the plate (assays are thereby performed in triplicate). 100 μL from each drug-containing well was then transferred to the adjacent well and the cycle repeated 10 times to produce a serial two-fold step gradient. The last wells were untreated and serve as a control for basal reporter activity. Transfected 293 cells were then trypsinized, washed with complete media, suspended in media and 100 μL aliquoted to each well containing drug (or no drug). Cells were incubated 24 hours.

### Assay of Reporter Activity

[0699] The SRα promoter is a hybrid transcriptional element comprising the SV40 early region (which drives T antigen transcription) and parts (R and U5) of the Long Terminal Repeat (LTR) of Human T Cell Lymphotropic Virus (HTLV-1). This promoter drives high, constitutive levels of the Secreted Alkaline Phosphate (SeAP) reporter gene. Activation of caspase-9 by dimerization rapidly leads to cell death and the proportion of cells dying increases with increasing drug amounts. When cells die, transcription and translation of reporter stops but already secreted reporter proteins persists in the media. Loss of constitutive SeAP activity is thereby an effective proxy for drug-dependent activation of cell death.

[0700] 24 hours after drug stimulation, 96-well plates were wrapped to prevent evaporation and incubated at 65®C for 2 hours to inactivate endogenous and serum phosphatases while the heat-stable SeAP reporter remains (1, 4, 100 μL samples from each well were loaded into individual wells of a 96-well assay plate with black sides. Samples were incubated with 0.5 mM 4-methylumbelliferyl phosphate (4-MUP) in 0.5 M diethanolamine at pH 10.0 for 4 to 16 hours.

[0701] Phosphatase activity was measured by fluorescence with excitation at 355 nm and emission at 460 nm. Data was transferred to a Microsoft Excel spreadsheet for tabulation and graphed with GraphPad Prism.

### Production of Isopropyloxyrapamycin

[0702] The method of Luengo et al. ((J. Org. Chem 59:6512, (1994)), (16, 17)) was employed. Briefly, 20 mg of rapamycin was dissolved in in 3 mL isopropanol and 22.1 mg of p-toluene sulfonic acid was added and incubated at room temperature with stirring for 4-12 hours. At completion, 5 mL ethyl acetate was added and products were extracted five times with saturated sodium bicarbonate and 3 times with brine (saturated sodium chloride). The organic phase was dried and redissolved in ethyl acetate:hexane (3:1). Stereoisomers and minor products were resolved by FLASH chromatography on a 10 to 15-mL silica gel column with 3:1 ethyl acetate: hexane under 3-4 KPa pressure and fractions dried. Fractions were assayed by spectrophotometry at 237 nM, 267 nM, 278 nM and 290 nM and tested for binding specificity in a FRB allele-specific transcriptional switch.

Direct Dimerization of FRB-Caspase with FKBP-Caspase with Rapamycin Directs Apoptosis.

[0703] Dimerization of FKBP-fused caspases can be dimerized by homodimerizer molecules, such as AP1510, AP20187 or AP1903. A similar pro-apototic switch can be directed via heterodimerization of a binary switch using rapamycin by coexpression of a FRB-Caspase-9 fusion protein along with FKBP-Caspase-9, leading to homodimerization of the caspase domains. In FIG. 37, a constitutively active SeAP reporter plasmid was cotransfected into 293T cells along with the caspase constructs. Transfected cells abundantly produced SeAP that was readily measured without drug and which served as the 100% normalization standard in the experiment. Incubation of the two fusion proteins with rimiducid produces a dose-dependent homodimerization of only FKBP12-Caspase9, leading to dimerization and activation of apoptosis, while FRB-Caspase9 remains excluded from the rimiducid-driven complex (left). In contrast, incubation with rapamycin associates FRB and FKBP directly and linked Caspase-9 moieties associate and activate. Cell death was measured indirectly by the loss of SeAP reporter production as cells die. This experiment demonstrated that heterodimerization with rapamycin produces dose-dependent cell death, revealing a novel safety switch with nanomolar drug sensitivity.

[0704] FIG. 37—Drug induced programmed cell death by homodimerization or heterodimerization of tagged caspase 9. 293T cells were transfected with SRα-SeAP (pBP0046), pSH1-FKBPv12-Caspase9 (pBP0044) and pSH1-FRB_{L}-Caspase9 (pBP0463). After 24 hours incubation, cells were split and incubated with increasing concentrations of rapamycin (blue), rimiducid (red) or ethanol (the solvent containing stock rapamycin). Loss of reporter activity is a proxy for the loss of cell viability. Reporter activity is expressed as a percentage of the average of 8 control wells containing no drug. Assays with drugs were performed in triplicate.

### Cell Death can be Directed by Rapamycin or Rapamycin Analogs.

[0705] Rapamycin is an effective heterodimerizing agent, but as a result of causing the docking of FKBP12 with the protein kinase mTOR, rapamycin is also a potent inhibitor of signal transduction, resulting in reduced protein translation and reduced cell growth. Derivatives of rapamycin at C3 or C7 ring positions have reduced affinity for mTOR but retain high affinity for mutants in “helix 4” of the FRB domain. Plasmid pBP0463 contains a mutation that substitutes leucine for the wild-type threonine at position 2098 in the FRB domain (using the mTOR numbering) and accommodates derivatives at C7. Incubation of 293T cells transfected with FRB_{L}-Caspase 9, FKBPᵥ12-Caspase 9 and the constitutive SeAP reporter produced a dose-dependent high efficacy cell death switch with rapamycin or the rapamycin analog (rapalog) C7-isopropyloxlrapamycin (FIG. 38).

[0706] FIG. 38—Rapalog-induced cell death switch. 293T cells were transfected with SRα-SeAP (pBP0046), pSH1-FKBPv12-Caspase9 (pBP0044) and pSH1-FRB_{L}-Caspase9 (pBP0463). After 24 hours incubation, cells were split and incubated with increasing concentrations of rapamycin (blue), C7-isopropyloxlrapamcin (green) or ethanol (the solvent containing drug stocks). Loss of reporter activity is a proxy for loss of cell viability. Reporter activity is expressed as a percentage of the average of 8 wells containing no drug. Drug-containing assays were performed in triplicate.

### Rapamycin-Induced Cell Death Requires the Presence of FRB-Caspase-9.

[0707] To demonstrate that rapamycin-induced cell death results from dimerization of Caspase-9 molecules linked separately with FRB and FKBP12, two control experiments were performed

[0708] (FIGS. 39 and 40). iC9 (FKBPv12-Caspase-9) was cotransfected with a control vector expressing only an epitope tag (FIG. 39) or a vector containing FRB without caspase fusion, but instead with a short, irrelevant tag (FIG. 40). In each case, incubation with rimiducid effectively permitted homodimerization and induction of Caspase-9, but rapamycin incubation did not promote cell death. These findings support the conclusion that the mechanism of rapamycin/rapalog-mediated cell death is activation of dimerized C9 molecules rather than recruitment of mTOR to Caspase-9 or due to an indirect mechanism involving endogenous mTOR inhibition.

[0709] FIG. 39—FRB-Caspase-9 is required for a rapamycin-induced cell death switch. 293T cells were transfected with SRα-SeAP (pBP0046), pS-NLS-E and pSH1-FKBPv12-Caspase9 (pBP0044).

[0710] FIG. 40—Caspase-9 fusion with FRB is required for a rapamycin-induced cell death switch. 293T cells were transfected with SRα-SeAP (pBP0046), pSH1-FRB_{L}, VP16 (pBP0731) (4) and pSH1-FKBPv12-Caspase9 (pBP0044). After 24 hours incubation, cells were split and incubated with increasing concentrations of rapamycin (blue), C7-isopropyloxlrapamcin (red), rimiducid (green) or ethanol (the solvent containing drug stocks). Loss of reporter activity is a proxy for the loss of cell viability. Reporter activity is expressed as a percentage of the average of 8 wells containing no drug. Drug-containing wells were assayed in triplicate wells.

[0711] The following references are referred to in this Example and are hereby incorporated by reference herein in their entireties:
[0712] 1. Spencer D M, Wandless T J, Schreiber S L, and Crabtree G R. Controlling signal transduction with synthetic ligands. Science. 1993; 262(5136):1019-24.
[0713] 2. Acevedo V D, Gangula R D, Freeman K W, Li R, Zhang Y, Wang F, Ayala G E, Peterson L E, Ittmann M, and Spencer D M. Inducible FGFR-1 activation leads to irreversible prostate adenocarcinoma and an epithelial-to-mesenchymal transition. Cancer Cell. 2007; 12(6):559-71.
[0714] 3. Spencer D M, Belshaw P J, Chen L, Ho S N, Randazzo F, Crabtree G R, and Schreiber S L. Functional analysis of Fas signaling in vivo using synthetic inducers of dimerization. Curr Biol. 1996; 6(7):839-47.
[0715] 4. Bayle J H, Grimley J S, Stankunas K, Gestwicki J E, Wandless T J, and Crabtree G R. Rapamycin analogs with differential binding specificity permit orthogonal control of protein activity. Chem Biol. 2006; 13(1):99-107.
[0716] 5. Strasser A, Cory S, and Adams J M. Deciphering the rules of programmed cell death to improve therapy of cancer and other diseases. EMBO J. 2011; 30(18):3667-83.
[0717] 6. Fan L, Freeman K W, Khan T, Pham E, and Spencer D M. Improved artificial death switches based on caspases and FADD. Hum Gene Ther. 1999; 10(14):2273-85.
[0718] 7. Straathof K C, Pule M A, Yotnda P, Dotti G, Vanin E F, Brenner M K, Heslop H E, Spencer D M, and Rooney C M. An inducible caspase 9 safety switch for T-cell therapy. Blood. 2005; 105(11):4247-54.
[0719] 8. Sabatini D M, Erdjument-Bromage H, Lui M, Tempst P, and Snyder S H. RAFT1: a mammalian protein that binds to FKBP12 in a rapamycin-dependent fashion and is homologous to yeast TORs. Cell. 1994; 78(1):35-43.
[0720] 9. Brown E J, Albers M W, Shin T B, Ichikawa K, Keith C T, Lane W S, and Schreiber S L. A mammalian protein targeted by G1-arresting rapamycin-receptor complex. Nature. 1994; 369(6483):756-8.
[0721] 10. Chen J, Zheng X F, Brown E J, and Schreiber S L. Identification of an 11-kDa FKBP12-rapamycin-binding domain within the 289-kDa FKBP12-rapamycin-associated protein and characterization of a critical serine residue. Proc Natl Acad Sci USA. 1995; 92(11):4947-51.
[0722] 11. Choi J, Chen J, Schreiber S L, and Clardy J. Structure of the FKBP12-rapamycin complex interacting with the binding domain of human FRAP. Science. 1996; 273(5272):239-42.
[0723] 12. Ho S N, Biggar S R, Spencer D M, Schreiber S L, and Crabtree G R. Dimeric ligands define a role for transcriptional activation domains in reinitiation. Nature. 1996; 382(6594):822-6.
[0724] 13. Klemm J D, Beals C R, and Crabtree G R. Rapid targeting of nuclear proteins to the cytoplasm. Curr Biol. 1997; 7(9):638-44.
[0725] 14. Stankunas K, Bayle J H, Gestwicki J E, Lin Y M, Wandless T J, and Crabtree G R. Conditional protein alleles using knockin mice and a chemical inducer of dimerization. Mol Cell. 2003; 12(6):1615-24.
[0726] 15. Stankunas K, Bayle J H, Havranek J J, Wandless T J, Baker D, Crabtree G R, and Gestwicki J E. Rescue of Degradation-Prone Mutants of the FK506-Rapamycin Binding (FRB) Protein with Chemical Ligands. Chembiochem. 2007.
[0727] 16. Liberles S D, Diver S T, Austin D J, and Schreiber S L. Inducible gene expression and protein translocation using nontoxic ligands identified by a mammalian three-hybrid screen. Proc Natl Acad Sci USA. 1997; 94(15):7825-30.
[0728] 17. Luengo J I, Yamashita D S, Dunnington D, Beck A K, Rozamus L W, Yen H K, Bossard M J, Levy M A, Hand A, Newman-Tarr T, et al. Structure-activity studies of rapamycin analogs: evidence that the C-7 methoxy group is part of the effector domain and positioned at the FKBP12-FRAP interface. Chem Biol. 1995; 2(7):471-81.
   pBP0463—pSH1-FRB_{L}.dCaspase9.T2A (From FIG. 41)

| | | SEQ ID | | SEQ ID |
|---|---|---|---|---|
| Fragment | Nucleotide | NO: | Peptide | NO: |
| Linker | ATGCTCGAG | 903 | MLE | 904 |
| FRB_{L} | TGGCATGAAGGGTTGGAAGAA | 905 | GVQVETISPGDGRTF | 906 |
| | GCTTCAAGGCTGTACTTCGGA | | PKRGQTCVVHYTGM | |
| | GAGAGGAACGTGAAGGGCAT | | LEDGKKFDSSRDRN | |
| | GTTTGAGGTTCTTGAACCTCT | | KPFKFMLGKQEVIRG | |
| | GCACGCCATGATGGAACGGG | | WEEGVAQMSVGQR | |
| | GACCGCAGACACTGAAAGAAA | | AKLTISPDYAYGATG | |
| | CCTCTTTTAATCAGGCCTACG | | HPPKIPPHATLVFDV | |
| | GCAGAGACCTGATGGAGGCC | | ELLKLE | |
| | CAAGAATGGTGTAGAAAGTAT | | | |
| | ATGAAATCCGGTAACGTGAAA | | | |
| | GACCTGCTCCAGGCCTGGGA | | | |
| | CCTTTATTACCATGTGTTCAG | | | |
| | GCGGATCAGTAAG | | | |
| Linker | TCAGGCGGTGGCTCAGGTGT | 907 | SGGGSGVD | 908 |
| | CGAG | | | |
| Δ- | GTCGACGGATTTGGTGATGTC | 909 | DGFGDVGALESLRG | 910 |
| Caspase9 | GGTGCTCTTGAGAGTTTGAGG | | NADLAYILSMEPCGH | |
| | GGAAATGCAGATTTGGCTTAC | | CLIINNVNFCRESGLR | |
| | ATCCTGAGCATGGAGCCCTGT | | TRTGSNIDCEKLRRR | |
| | GGCCACTGCCTCATTATCAAC | | FSSLHFMVEVKGDLT | |
| | AATGTGAACTTCTGCCGTGAG | | AKKMVLALLELARQD | |
| | TCCGGGCTCCGCACCCGCAC | | HGALDCCVVVILSHG | |
| | TGGCTCCAACATCGACTGTGA | | CQASHLQFPGAVYG | |
| | GAAGTTGCGGCGTCGCTTCTC | | TDGCPVSVEKIVNIFN | |
| | CTCGCTGCATTTCATGGTGGA | | GTSCPSLGGKPKLFF | |
| | GGTGAAGGGCGACCTGACTG | | IQACGGEQKDHGFE | |
| | CCAAGAAAATGGTGCTGGCTT | | VASTSPEDESPGSN | |
| | TGCTGGAGCTGGCGCgGCAG | | PEPDATPFQEGLRTF | |
| | GACCACGGTGCTCTGGACTG | | DQLDAISSLPTPSDIF | |
| | CTGCGTGGTGGTCATTCTCTC | | VSYSTFPGFVSWRD | |
| | TCACGGCTGTCAGGCCAGCC | | PKSGSWYVETLDDIF | |
| | ACCTGCAGTTCCCAGGGGCT | | EQWAHSEDLQSLLL | |
| | GTCTACGGCACAGATGGATGC | | RVANAVSVKGIYKQM | |
| | CCTGTGTCGGTCGAGAAGATT | | PGCFNFLRKKLFFKT | |
| | GTGAACATCTTCAATGGGACC | | SASRA | |
| | AGCTGCCCCAGCCTGGGAGG | | | |
| | GAAGCCCAAGCTCTTTTTCAT | | | |
| | CCAGGCCTGTGGTGGGGAGC | | | |
| | AGAAAGACCATGGGTTTGAGG | | | |
| | TGGCCTCCACTTCCCCTGAAG | | | |
| | ACGAGTCCCCTGGCAGTAACC | | | |
| | CCGAGCCAGA TGCCACCCCG | | | |
| | TTCCAGGAAGGTTTGAGGACC | | | |
| | TTCGACCAGCTGGACGCCATA | | | |
| | TCTAGTTTGCCCACACCCAGT | | | |
| | GACATCTTTGTGTCCTACTCTA | | | |
| | CTTTCCCAGGTTTTGTTTCCTG | | | |
| | GAGGGACCCCAAGAGTGGCT | | | |
| | CCTGGTACGTTGAGACCCTGG | | | |
| | ACGACATCTTTGAGCAGTGGG | | | |
| | CTCACTCTGAAGACCTGCAGT | | | |
| | CCCTCCTGCTTAGGGTCGCTA | | | |
| | ATGCTGTTTCGGTGAAAGGGA | | | |
| | TTTATAAACAGATGCCTGGTT | | | |
| | GCTTTAATTTCCTCCGGAAAA | | | |
| | AACTTTTCTTTAAAACATCAGC | | | |
| | TAGCAGAGCC | | | |
| T2A | GAGGGCAGGGGAAGTCTTCT | 911 | EGRGSLLTCGDVEE | 912 |
| | AACATGCGGGGACGTGGAGG | | NPGP | 30 |
| | AAAATCCCGGGCCCtga | | | |

pBP0044—pSH1-FKBPᵥ₃₆.dCaspase9.T2A (from FIG. 42

| | | SEQ ID | | SEQ ID |
|---|---|---|---|---|
| Fragment | Nucleotide | NO: | Peptide | NO: |
| Linker | ATGCTCGAG | 913 | MLE | 914 |
| FKBPv36 | GGAGTGCAGGTGGAgACtATC | 915 | GVQVETISPGDGRTF | 916 |
| | TCCCCAGGAGACGGGCGCAC | | PKRGQTCVVHYTGM | |
| | CTTCCCCAAGCGCGGCCAGA | | LEDGKKVDSSRDRN | |
| | CCTGCGTGGTGCACTACACC | | KPFKFMLGKQEVIRG | |
| | GGGATGCTTGAAGATGGAAAG | | WEEGVAQMSVGQR | |
| | AAAGTTGATTCCTCCCGGGAC | | AKLTISPDYAYGATG | |
| | AGAAACAAGCCCTTTAAGTTT | | HPGIIPPHATLVFDVE | |
| | ATGCTAGGCAAGCAGGAGGT | | LLKL | |
| | GATCCGAGGCTGGGAAGAAG | | | |
| | GGGTTGCCCAGATGAGTGTG | | | |
| | GGTCAGAGAGCCAAACTGACT | | | |
| | ATATCTCCAGATTATGCCTATG | | | |
| | GTGCCACTGGGCACCCAGGC | | | |
| | ATCATCCCACCACATGCCACT | | | |
| | CTCGTCTTCGATGTGGAGCTT | | | |
| | CTAAAACTGGAA | | | |
| Linker | TCAGGCGGTGGCTCAGGTGT | 917 | SGGGSGVD | 918 |
| | CGAG | | | |
| Δ- | GTCGACGGATTTGGTGATGTC | 919 | DGFGDVGALESLRG | 920 |
| Caspase9 | GGTGCTCTTGAGAGTTTGAGG | | NADLAYILSMEPCGH | |
| | GGAAATGCAGATTTGGCTTAC | | CLIINNVNFCRESGLR | |
| | ATCCTGAGCATGGAGCCCTGT | | TRTGSNIDCEKLRRR | |
| | GGCCACTGCCTCATTATCAAC | | FSSLHFMVEVKGDLT | |
| | AATGTGAACTTCTGCCGTGAG | | AKKMVLALLELARQD | |
| | TCCGGGCTCCGCACCCGCAC | | HGALDCCVVVILSHG | |
| | TGGCTCCAACATCGACTGTGA | | CQASHLQFPGAVYG | |
| | GAAGTTGCGGCGTCGCTTCTC | | TDGCPVSVEKIVNIFN | |
| | CTCGCTGCATTTCATGGTGGA | | GTSCPSLGGKPKLFF | |
| | GGTGAAGGGCGACCTGACTG | | IQACGGEQKDHGFE | |
| | CCAAGAAAATGGTGCTGGCTT | | VASTSPEDESPGSN | |
| | TGCTGGAGCTGGCGCgGCAG | | PEPDATPFQEGLRTF | |
| | GACCACGGTGCTCTGGACTG | | DQLDAISSLPTPSDIF | |
| | CTGCGTGGTGGTCATTCTCTC | | VSYSTFPGFVSWRD | |
| | TCACGGCTGTCAGGCCAGCC | | PKSGSWYVETLDDIF | |
| | ACCTGCAGTTCCCAGGGGCT | | EQWAHSEDLQSLLL | |
| | GTCTACGGCACAGATGGATGC | | RVANAVSVKGIYKQM | |
| | CCTGTGTCGGTCGAGAAGATT | | PGCFNFLRKKLFFKT | |
| | GTGAACATCTTCAATGGGACC | | SASRA | |
| | AGCTGCCCCAGCCTGGGAGG | | | |
| | GAAGCCCAAGCTCTTTTTCAT | | | |
| | CCAGGCCTGTGGTGGGGAGC | | | |
| | AGAAAGACCATGGGTTTGAGG | | | |
| | TGGCCTCCACTTCCCCTGAAG | | | |
| | ACGAGTCCCCTGGCAGTAACC | | | |
| | CCGAGCCAGATGCCACCCCG | | | |
| | TTCCAGGAAGGTTTGAGGACC | | | |
| | TTCGACCAGCTGGACGCCATA | | | |
| | TCTAGTTTGCCCACACCCAGT | | | |
| | GACATCTTTGTGTCCTACTCTA | | | |
| | CTTTCCCAGGTTTTGTTTCCTG | | | |
| | GAGGGACCCCAAGAGTGGCT | | | |
| | CCTGGTACGTTGAGACCCTGG | | | |
| | ACGACATCTTTGAGCAGTGGG | | | |
| | CTCACTCTGAAGACCTGCAGT | | | |
| | CCCTCCTGCTTAGGGTCGCTA | | | |
| | ATGCTGTTTCGGTGAAAGGGA | | | |
| | TTTATAAACAGATGCCTGGTT | | | |
| | GCTTTAATTTCCTCCGGAAAA | | | |
| | AACTTTTCTTTAAAACATCAGC | | | |
| | TAGCAGAGCC | | | |
| T2A | GAGGGCAGGGGAAGTCTTCT | 921 | EGRGSLLTCGDVEE | 922 |
| | AACATGCGGGGACGTGGAGG | | NPGP | |
| | AAAATCCCGGGCCCtga | | | |

### Materials and Methods

[0729] The following set of materials and methods may be consulted for preparing or assaying certain embodiments of the present application.

### Production of Retroviruses and Transduction of Peripheral Blood Mononuclear Cells (PBMCs)

[0730] HEK 293T cells (1.5×10⁵) are seeded on a 100-mm tissue culture dish in 10 mL DMEM4500, supplemented with glutamine, penicillin/streptomycin and 10% fetal calf serum. After 16-30 hours incubation, cells are transfected using Novagen's GeneJuice® protocol. Briefly, for each transfection, 0.5 mL OptiMEM (LifeTechnologies) is pipeted into a 1.5-mL microcentrifuge tube and 30 μL GeneJuice reagent added followed by 5 sec. vortexing. Samples are rested 5 minutes to settle the GeneJuice suspension. DNA (15 μg total) is added to each tube and mixed by pipetting up and down four times. Samples are allowed to rest for 5 minutes for GeneJuice-DNA complex formation and the suspension added dropwise to one dish of 293T cells. A typical transfection included these plasmids to produce replication incompetent retrovirus: 3.75 μg plasmid containing gag-pol (pEQ-PAM3(-E)), 2.5 μg plasmid containing viral envelope (e.g., RD114), Retrovirus containing gene of interest=3=3.75 μg.

[0731] PBMCs are stimulated with anti-CD3 and anti-CD28 antibodies precoated to wells of tissue culture plates. 24 hours after plating, 100 U/ml IL-2 is added to the culture. On day 2 or three supernatant containing retrovirus from transfected 293T cells is filtered at 0.45 μm and centrifuged on non-TC treated plates precoated with Retronectin (10 μl per well in 1 ml of PBS per 1 cm² of surface). Plates are centrifuged at 2000 g for 2 hours at room temperature. CD3/CD28 blasts are resuspended at 2.5×10⁵ cells/ml in complete media, supplemented with 100 U/ml IL-2 and centrifuged on the plate at 1000×g for 10 minutes at room temperature. After 3-4 days incubation cells are counted and transduction efficiency measured by flow cytometry using the appropriate marker antibodies (typically CD34 or CD19). Cells are maintained in complete media supplemented with 100 U/ml IL-2, refed cells every 2-3 days with fresh media and IL-2 and split as needed to expand the cells.

### T Cell Caspase Assay in Cultured Cells

[0732] After transduction with the appropriate retrovirus, 50,000 T are seeded per well of 96-well plates in the presence or absence of suicide drugs (rimiducid or rapamycin) in CTL medium without IL-2. To enable detection of apoptosis using the IncuCyte instrument, 2 μM of IncuCyte™ Kinetic Caspase-3/7 Apoptosis reagent (Essen Bioscience, 4440) are add to each well to reach a total volume of 200 ul. The plates are centrifuged for 5 min at 400×g and placed inside the IncuCyte (Dual Color Model 4459) to monitor green fluorescence every 2-3 hours for a total of 48 hours at 10× objective. Image analysis is performed using the “Tcells_caspreagent_phase_green_10×_MLD” processing definition. The “Total Green Object Integrated Intensity” metric is used to quantify caspase activation. Each condition is performed in duplicates and each well is imaged at 4 different locations.

### T Cell Anti-Tumor Assay

[0733] The HPAC PSCA⁺ tumor cells are stably labeled with nuclear-localized RFP protein using the NucLight™ Red Lentivirus Reagent (Essen Bioscience, 4625). To set up the coculture, 4000 HPAC-RFP cells are seeded per well of 96-well plates in 100 ul of CTL medium without IL-2 for at least 4 hours to allow tumor cells to adhere. After transduction with the appropriate retrovirus and allowed to rest for at least 7 days in culture, T are seeded according to various E:T ratios to the HPAC-RFP-containing 96-well plates. Rimiducid is also added to the culture to reach 300 ul total volume per well. Each plate is set up in duplicates, one plate to monitor with the IncuCyte and one plate for supernatant collection for ELISA assay on day 2. The plates are centrifuged for 5 min at 400×g and placed inside the IncuCyte (Dual Color Model 4459) to monitor red fluorescence (and green fluorescence if T cells are labeled with GFP-Ffluc) every 2-3 hours for a total of 7 days at 10× objective. Image analysis is performed using the “HPAC-RFP_TcellsGFP_10×_MLD” processing definition. On day 7, HPAC-RFP cells are analyzed using the “Red Object Count (1/well)” metric. Also on day 7, 0 or 10 nM of suicide drug are added to each well of the coculture and placed back in the IncuCyte to monitor T cell elimination. On day 8, Tcell-GFP cells are analyzed using the “Total Green Object Integrated Intensity” metric. Each condition is performed at least in duplicates and each well is imaged at 4 different locations.

[0734] To measure Raji cell anti-tumor activity populations of cells are determined by flow cytometry rather than incucyte as the cells do not adhere to a plate. Raji cells (ATCC) labeled by stable expression of Green Fluorescent Protein (Raji-GFP) are a Burkitt's lymphoma cell line that express CD19 on the cell surface and are a target for an anti-CD19 CAR. 50000 Raji-GFP cells are seeded on a 24 well plate with 10000 CAR-T cells, a 1:5 E:T ratio. Media supernatant is taken at 48 hours for determination of cytokine release by activated CAR-T cells. The degree of tumor killing is determined at 7 days an 14 days by flow cytometry (Galeos, Beckman-Coulter) by the proportion of GFP labeled tumor cells and CD3 labeled T cells.

### IVIS Imaging

[0735] NSG mice with labeled T cells anesthetized with isofluorane and injected with 100 μl D-luciferin (15 mg/ml stock solution in PBS) by an intraperitoneal (i.p.) route in the lower abdomen. After 10 minutes the animals are transferred from the anesthesia chamber to the IVIS platform. Images are acquired from the dorsal and ventral sides with an IVIS imager (Perkin-Elmer), and BLI quantitated and documented with Living Image software (IVIS Imaging Systems).

### Western Blot

[0736] After transduction with the appropriate retrovirus, 6,000,000 T cells are seeded per well of 6-well plates in 3 ml CTL medium. Twenty four hours later, cells are collected, washed in cold PBS, and lysed in RIPA Lysis and Extraction Buffer (Thermo, 89901) containing 1× Halt Protease Inhibitor Cocktail (Thermo, 87786) on ice for 30 min. in the plated. The lysates are centrifuged at 16,000×g for 20 min at 4° C. and the supernatants are transferred to new Eppendorf tubes. Protein assay is performed using the Pierce BCA Protein Assay Kit (Thermo, 23227) per manufacturer's recommendation. To prepare samples for SDS-PAGE, 50 ug of lysates are mixed with 4× Laemmli Sample Buffer (Bio Rad, 1610747) and heat at 95° C. for 10 min. Meanwhile, 10% SDS gels are prepared using Bio Rad casting apparatus and 30% Acrylamide/bis Solution (Bio Rad, 160158). The samples are loaded along with Precision Plus Protein Dual Color Standards (Bio Rad, 1610374) and ran in 1× Tris/glycine Running Buffer (Bio Rad, 1610771) at 140 V for 90 min. After protein separation, the gels are transferred onto PVDF membranes using the program 0 (7 min total) in the iBlot 2 device (Thermo, IB21001). The membranes are probed with primary and secondary antibodies using the iBind Flex Western Device (Thermo, SLF2000) according to manufacturer's recommendation. Anti-MyD88 antibody (Sigma, SAB1406154) is used at 1:200 dilution and the secondary HRP-conjugated goat anti-mouse IgG antibody (Thermo, A16072) is used at 1:500 dilution. The caspase-9 antibody (Thermo, PA1-12506) is used at 1:200 dilution and the secondary HRP-conjugated goat anti-rabbit IgG antibody (Thermo, A16104) is used at 1:500 dilution. The β-actin antibody (Thermo, PA1-16889) is used at 1:1000 dilution and the secondary HRP-conjugated goat anti-rabbit IgG antibody (Thermo, A16104) is used at 1:1000 dilution. The membranes are developed using the SuperSignal West Femto Maximum Sensitivity Substrate Kit (Thermo, 34096) and imaged using the GelLogic 6000 Pro camera and the CareStream MI software (v.5.3.1.16369).

### Transfection of Cells for Reporter Assay

[0737] HEK 293T cells (1.5×10⁵) are seeded on a 100-mm tissue culture dish in 10 mL DMEM4500, supplemented with glutamine, penicillin/streptomycin and 10% fetal calf serum. After 16-30 hours incubation, cells are transfected using Novagen's GeneJuice® protocol. Briefly, for each transfection, 0.5 mL OptiMEM is pipeted into a 1.5-mL microcentrifuge tube and 15 μL GeneJuice reagent added followed by 5 sec. vortexing. Samples are rested 5 minutes to settle the GeneJuice suspension. DNA (5 μg total) is added to each tube and mixed by pipetting up and down four times. Samples are allowed to rest for 5 minutes for GeneJuice-DNA complex formation and the suspension added dropwise to one dish of 293T cells. A typical transfection contains 1 μg NFkB-SEAP (5), 4 μg Go-CAR (pBP0774) or 4 μg MC-Rap-CAR (pBP1440) (1).

Stimulation of Cells with Dimerizing Drugs

[0738] 24 hours following transfection (4.1), 293T cells are split to 96-well plates and incubated with dilutions of dimerizing drugs. Briefly, 100 μL media is added to each well of a 96-well flat-bottom plate. Drugs are diluted in tubes to a concentration 4× the top concentration in the gradient to be place on the plate. 100 μL of dimerizing ligand (rimiducid, rapamycin, isopropoxylrapamycin) is added to each of three wells on the far right of the plate (assays are thereby performed in triplicate). 100 μL from each drug-containing well is then transferred to the adjacent well and the cycle repeated 10 times to produce a serial two-fold step gradient. The last wells are untreated and serve as a control for basal reporter activity. Transfected 293 cells are then trypsinized, washed with complete media, suspended in media and 100 μL aliquoted to each well containing drug (or no drug). Cells are incubated 24 hours.

### Assay of Reporter Activity

[0739] The SRα promoter is a hybrid transcriptional element comprising the SV40 early region (which drives T antigen transcription) and parts (R and U5) of the Long Terminal Repeat (LTR) of Human T Cell Lymphotropic Virus (HTLV-1). This promoter drives high, constitutive levels of the Secreted Alkaline Phosphate (SeAP) reporter gene. Activation of caspase-9 by dimerization rapidly leads to cell death and the proportion of cells dying increases with increasing drug amounts. When cells die, transcription and translation of reporter stops but already secreted reporter proteins persists in the media. Loss of constitutive SeAP activity is thereby an effective proxy for drug-dependent activation of cell death.

[0740] 24 hours after drug stimulation, 96-well plates are wrapped to prevent evaporation and incubated at 65®C for 2 hours to inactivate endogenous and serum phosphatases while the heat-stable SeAP reporter remains (3, 12, 14). 100 μL samples from each well are loaded into individual wells of a 96-well assay plate with black sides. Samples are incubated with 0.5 mM 4-methylumbelliferyl phosphate (4-MUP) in 0.5 M diethanolamine at pH 10.0 for 4 to 16 hours. Phosphatase activity is measured by fluorescence with excitation at 355 nm and emission at 460 nm. Data is transferred to a Microsoft Excel spreadsheet for tabulation and graphed with GraphPad Prism.

### Production of Isopropyloxyrapamycin

[0741] The method of Luengo et al. ((J. Org. Chem 59:6512, (1994)), (17, 18)) is employed. Briefly, 20 mg of rapamycin is dissolved in in 3 mL isopropanol and 22.1 mg of p-toluene sulfonic acid is added and incubated at room temperature with stirring for 4-12 hours. At completion, 5 mL ethyl acetate is added and products are extracted five times with saturated sodium bicarbonate and 3 times with brine (saturated sodium chloride). The organic phase is dried and redissolved in ethyl acetate:hexane (3:1). Stereoisomers and minor products are resolved by FLASH chromatography on a 10 to 15-mL silica gel column with 3:1 ethyl acetate: hexane under 3-4 KPa pressure and fractions dried. Fractions are assayed by spectrophotometry at 237 nM, 267 nM, 278 nM and 290 nM and tested for binding specificity in a FRB allele-specific transcriptional switch.

### Example 25

### Representative Embodiments

[0742] Provided hereafter are examples of certain embodiments of the technology.
[0743] A1. A nucleic acid comprising a promoter, operably linked to
[0744] a) a first polynucleotide encoding a first chimeric polypeptide, wherein the first chimeric polypeptide comprises (i) a first ligand binding region; (ii) a MyD88 polypeptide region or a truncated MyD88 polypeptide region lacking the TIR domain; and (iii) a CD40 cytoplasmic polypeptide region lacking the CD40 extracellular domain; and
[0745] b) a second polynucleotide encoding a second chimeric polypeptide, wherein the second chimeric polypeptide comprises a pro-apoptotic polypeptide region and a second ligand binding region, wherein the second ligand binding region has a different amino acid sequence than the first ligand binding region; wherein
[0746] the first and second ligand binding regions are capable of binding to a first multimeric ligand;
[0747] the first ligand binding region is capable of binding to a second ligand; and
[0748] the second ligand does not significantly bind to the second ligand binding region.
[0749] A2. A nucleic acid comprising a promoter, operably linked to
[0750] a) a first polynucleotide encoding a first chimeric polypeptide, wherein the first chimeric polypeptide comprises (i) a first ligand binding region; and (ii) a MyD88 polypeptide region or a truncated MyD88 polypeptide region lacking the TIR domain; and
[0751] b) a second polynucleotide encoding a second chimeric polypeptide, wherein the second chimeric polypeptide comprises a pro-apoptotic polypeptide region and a second ligand binding region, wherein the second ligand binding region has a different amino acid sequence than the first ligand binding region; wherein
[0752] the first and second ligand binding regions are capable of binding to a first ligand;
[0753] the first ligand binding region is capable of binding to a second ligand; and
[0754] the second ligand does not significantly bind to the second ligand binding region.
[0755] A3. The nucleic acid of any one of embodiments A1-A3, wherein the nucleic acid further comprises a polynucleotide encoding a linker polypeptide between the first and second polynucleotides, wherein the linker polypeptide separates the translation products of the first and second polynucleotides during or after translation.
[0756] A3.2. The nucleic acid of embodiment A3, wherein the linker polypeptide is a 2A polypeptide.
[0757] A4. The nucleic acid of any one of embodiments A1-A3.2, wherein the second ligand is not capable of binding to the second ligand binding region.
[0758] A5. The nucleic acid of any one of embodiments A1-A4, wherein the nucleic acid further comprises a third polynucleotide encoding a marker polypeptide.
[0759] A6. The nucleic acid of any one of embodiments A1-A4, wherein the first chimeric polypeptide further comprises a marker polypeptide.
[0760] A7. The nucleic acid of any one of embodiments A1-A4, wherein the second chimeric polypeptide further comprises a marker polypeptide.
[0761] A8. The nucleic acid of embodiment A7, wherein the marker polypeptide is a ΔCD19 polypeptide.
[0762] A9. The nucleic acid of any one of embodiments A1-A8, wherein the first chimeric polypeptide further comprises a membrane-targeting region.
[0763] A10. The nucleic acid of embodiment A9, wherein the membrane-targeting region is selected from the group consisting of a myristoylation region, palmitoylation region, prenylation region, NKG2D receptor, and transmembrane sequences of receptors.
[0764] A11. The nucleic acid of embodiment A10, wherein the membrane-targeting region is a myristoylation region.
[0765] A12. The nucleic acid of embodiment A11, wherein the myristoylation region has an amino acid sequence of SEQ ID NO: 3 or a functional fragment thereof.
[0766] A13. The nucleic acid of any one of embodiments A1-A12, wherein the first ligand binding region is an FKBP12 region.
[0767] A14. The nucleic acid of embodiment A13, wherein the FKBP12 region has an amino acid substitution at position 36 selected from the group consisting of valine, leucine, isoleuceine and alanine.
[0768] A15. The nucleic acid of embodiment A13, wherein the first ligand binding region is an FKBP12v36 region.
[0769] A16. The nucleic acid of any one of embodiments A1-A12, wherein the first ligand binding region comprises two or more ligand binding regions.
[0770] A17. The nucleic acid of embodiment A16, wherein the two or more ligand binding regions are each an FKBP12 region.
[0771] A18. The nucleic acid of embodiments A17, wherein at least one FKBP12 region has an amino acid substitution at position 36 selected from the group consisting of valine, leucine, isoleuceine and alanine.
[0772] A19. The nucleic acid of embodiment A17, wherein at least one ligand binding region is an FKBP12v36 region.
[0773] A20. The nucleic acid of any one of embodiments A1-A19, wherein the second ligand binding region is an FRB region.
[0774] A21. The nucleic acid of embodiment A20, wherein the second ligand binding region is a FKBP12-Rapamycin Binding domain (FRB).
[0775] A22. The nucleic acid of embodiment A20, wherein the FRB region is selected from the group consisting of KLW (T2098L), KTF (W2101F), and KLF (T2098L, W2101F).
[0776] A23. The nucleic acid of any one of embodiments A1-A22, wherein the first ligand is rapamycin or a rapalog.
[0777] A24. The nucleic acid of embodiment A23, wherein the rapalog is selected from the group consisting of S-o,p-dimethoxyphenyl (DMOP)-rapamycin, R-Isopropoxyrapamycin, and S-Butanesulfonamidorap.
[0778] A25. The nucleic acid of any one of embodiments A1-A23, wherein the second ligand is AP1903, AP20187, or AP1510.
[0779] A26. The nucleic acid of any one of embodiments A1-A25, wherein the promoter is operably linked to the first polynucleotide and the second polynucleotide.
[0780] A27. The nucleic acid of any one of embodiments A1-A26, wherein the promoter is developmentally regulated.
[0781] A28. The nucleic acid of any one of embodiments A1-A27, wherein the promoter is tissue-specific.
[0782] A29. The nucleic acid of any one of embodiments A1-A26, wherein the promoter is activated in activated T cells.
[0783] A30. The nucleic acid of any one of embodiments A1-A29, wherein the pro-apoptotic polypeptide is selected from the group consisting of caspase 1, 2, 3, 4, 5, 6, 7, 8, 9, 10, 11, 12, 13, or 14, FADD (DED), APAF1 (CARD), CRADD/RAIDD CARD), ASC (CARD), Bax, Bak, Bcl-xL, Bcl-2, RIPK3, and RIPK1-RHIM.
[0784] A31. The nucleic acid of any one of embodiments A1-A29, wherein the pro-apoptotic polypeptide is a caspase polypeptide.
[0785] A32. The nucleic acid of any one of embodiments A1-A29, wherein the pro-apoptotic polypeptide is a Caspase-9 polypeptide.
[0786] A33. The nucleic acid of any one of embodiments A31-A32, wherein the caspase polypeptide comprises the amino acid sequence of SEQ ID NO: 300.
[0787] A34. The nucleic acid of any one of embodiments A31-A32, wherein the caspase polypeptide is a modified Caspase-9 polypeptide comprising an amino acid substitution selected from the group consisting of the catalytically active caspase variants in Tables 5 or 6.
[0788] A35. The nucleic acid of any one of embodiments A31-A32, wherein the caspase polypeptide is a modified Caspase-9 polypeptide comprising an amino acid sequence selected from the group consisting of D330A, D330E, and N405Q.
[0789] A36. The nucleic acid of any one of embodiments A1-A2, or A4-A35, wherein the truncated MyD88 polypeptide has the amino acid sequence of SEQ ID NO: 214, or a functional fragment thereof.
[0790] A36.1. The nucleic acid of any one of embodiments A1-A2, or A4-A35, wherein the MyD88 polypeptide has the amino acid sequence of SEQ ID NO: 282, or a functional fragment thereof.
[0791] A37. The nucleic acid of any one of embodiments A1 or A3-A36.1, wherein the cytoplasmic CD40 polypeptide has the amino acid sequence of SEQ ID NO: 216, or a functional fragment thereof.
[0792] A38. The nucleic acid of any one of embodiments A1-A37, wherein the first chimeric polypeptide further comprises a chimeric antigen receptor.
[0793] A39. The nucleic acid of any one of embodiments A1-A37, wherein the nucleic acid further comprises a polynucleotide encoding a chimeric antigen receptor.
[0794] A40. The nucleic acid of any one of embodiments A1-37, wherein the first chimeric polypeptide further comprises a T cell receptor, or a T cell receptor-based chimeric antigen receptor.
[0795] A40.1. The nucleic acid of embodiment A40, wherein the T cell receptor binds to an antigenic polypeptide selected from the group consisting of PRAME, Bob-1, and NY-ESO-1.
[0796] A41. The nucleic acid of any one of embodiments A1-A37, wherein the nucleic acid further comprises a polynucleotide encoding a T cell receptor or a T cell receptor-based chimeric antigen receptor.
[0797] A41.1. The nucleic acid of embodiment A41, wherein the T cell receptor binds to an antigenic polypeptide selected from the group consisting of PRAME, Bob-1, and NY-ESO-1.
[0798] A42. The nucleic acid of any one of embodiments A38-A41, wherein the chimeric antigen receptor comprises (i) a transmembrane region, (ii) a T cell activation molecule, and (iii) an antigen recognition moiety.
[0799] A43. The nucleic acid of embodiment A42, wherein the antigen recognition moiety is a single chain variable fragment that binds to CD19.
[0800] A44. The nucleic acid of any one of embodiments A42-A43, wherein the antigen recognition moiety is a single chain variable fragment that binds to PSCA.
[0801] A45. The nucleic acid of any one of embodiments A42-A43, wherein the antigen recognition moiety is a single chain variable fragment that binds to Her2/Neu.
[0802] A46. The nucleic acid of any one of embodiments A42-A45, wherein the T cell activation molecule is an ITAM-containing, Signal 1 conferring molecule.
[0803] A47. The nucleic acid of any one of embodiments A42-A45, wherein the T cell activation molecule is a CD3 ζ polypeptide.
[0804] A48. The nucleic acid of any one of embodiments A42-A45, wherein the T cell activation molecule is an Fc epsilon receptor gamma (FcεR1γ) subunit polypeptide.
[0805] A49. The nucleic acid of any one of embodiments A42 or A45-A48, wherein the antigen recognition moiety binds to an antigen on a tumor cell.
[0806] A50. The nucleic acid of any one of embodiments A42 or A45-A48, wherein the antigen recognition moiety binds to an antigen on a cell involved in a hyperproliferative disease.
[0807] A51. The nucleic acid of any one of embodiments A42 or A45-A48, wherein the antigen recognition moiety binds to an antigen selected from the group consisting of PSMA, PSCA, Muc1 CD19, ROR1, Mesothelin, GD2, CD123, Muc16, CD33, CD38, CD44v6, and Her2/Neu.
[0808] A52. The nucleic acid of any one of embodiments A42 or A45-A48, wherein the antigen recognition moiety binds to a viral or bacterial antigen.
[0809] A53. The nucleic acid of any one of embodiments A42 or A45-A48, wherein the antigen recognition moiety is a single chain variable fragment.
[0810] A54. The nucleic acid of any one of embodiments A42-A53, wherein the transmembrane region is a CD8 transmembrane region.
[0811] A55-A67. Reserved.
[0812] A68. The nucleic acid of any one of embodiments A1-A54, wherein the nucleic acid is contained within a viral vector.
[0813] A69. The nucleic acid of embodiment A68, wherein the viral vector is a retroviral vector.
[0814] A70. The nucleic acid of embodiment A69, wherein the retroviral vector is a murine leukemia virus vector.
[0815] A71. The nucleic acid of embodiment A69, wherein the retroviral vector is an SFG vector.
[0816] A72. The nucleic acid of embodiment A68, wherein the viral vector is an adenoviral vector.
[0817] A73. The nucleic acid of embodiment A68, wherein the viral vector is a lentiviral vector.
[0818] A74. The nucleic acid of embodiment A68, wherein the viral vector is selected from the group consisting of adeno-associated virus (AAV), Herpes virus, and Vaccinia virus.
[0819] A75. The nucleic acid of any one of embodiments A1-A74, wherein the nucleic acid is prepared or in a vector designed for electroporation, sonoporation, or biolistics, or is attached to or incorporated in chemical lipids, polymers, inorganic nanoparticles, or polyplexes.
[0820] A76. The nucleic acid of any one of embodiments A1-A54, or A75, wherein the nucleic acid is contained within a plasmid.
[0821] A77. The nucleic acid of any one of embodiments A1-A76, comprising a polynucleotide coding for a polypeptide provided in the tables of Example 23.
[0822] A78. The nucleic acid of any one of embodiments A1-A76, comprising a polynucleotide coding for a polypeptide provided in the tables of Example 23 selected from group consisting of FKBPv36, FpK′, FpK, Fv, Fv′, FKBPpK′, FKBPpK″, and FKBPpK″.
[0823] A79. The nucleic acid of any one of embodiments A1-A76, comprising a polynucleotide coding for a polypeptide provided in the tables of Example 23 selected from group consisting of FKBPv36, FpK′, FpK, Fv, Fv′, FKBPpK′, FKBPpK″, and FKBPpK″.
[0824] A80. The nucleic acid of any one of embodiments A1-A76, comprising a polynucleotide coding for a polypeptide provided in the tables of Example 23 selected from group consisting of FKBPv36, FpK′, FpK, Fv, Fv′, FKBPpK′, FKBPpK″, and FKBPpK″.
[0825] A81. The nucleic acid of any one of embodiments A1-A80, comprising a polynucleotide coding for a polypeptide provided in the tables of Example 23 selected from group consisting of FRP5-VL, FRP5-VH, FMC63-VL, and FMC63-VH.
[0826] A82. The nucleic acid of embodiment A81, comprising a polynucleotide coding for FRP5-VL and FRP5-VH.
[0827] A83. The nucleic acid of embodiment A81, comprising a polynucleotide coding for FMC63-VL and FMC63-VH.
[0828] A84. The nucleic acid of any one of embodiments A1-A83, comprising a polynucleotide coding for a polypeptide provided in the tables of Example 23 selected from group consisting of MyD88L and MyD88.
[0829] A85. The nucleic acid of any one of embodiments A1-A84, comprising a polynucleotide coding for a ΔCaspase-9 polypeptide provided in the tables of Example 23.
[0830] A86. The nucleic acid of any one of embodiments A1-A85, comprising a polynucleotide coding for a ΔCD19 polypeptide provided in the tables of Example 23.
[0831] A87. The nucleic acid of any one of embodiments A1-A86, comprising a polynucleotide coding for a hCD40 polypeptide provided in the tables of Example 23.
[0832] A88. The nucleic acid of any one of embodiments A1-A87, comprising a polynucleotide coding for a CD3zeta polypeptide provided in the tables of Example 23.
[0833] B1. A modified cell, transfected or transduced with a nucleic acid of any one of embodiments A1-A88.
[0834] C1. A modified cell, comprising
[0835] a) a first polynucleotide encoding a first chimeric polypeptide, wherein the first chimeric polypeptide comprises (i) a first ligand binding region; (ii) a MyD88 polypeptide region or a truncated MyD88 polypeptide region lacking the TIR domain; and (iii) a CD40 cytoplasmic polypeptide region lacking the CD40 extracellular domain; and
[0836] b) a second polynucleotide encoding a second chimeric polypeptide, wherein the second chimeric polypeptide comprises a pro-apoptotic polypeptide region and a second ligand binding region, wherein the second ligand binding region has a different amino acid sequence than the first ligand binding region;
[0837] wherein
[0838] the first and second ligand binding regions are capable of binding to a first ligand;
[0839] the first ligand binding region is capable of binding to a second ligand; and
[0840] the second ligand does not significantly bind to the second ligand binding region.
[0841] C2. A modified cell comprising
[0842] a) a first polynucleotide encoding a first chimeric polypeptide, wherein the first chimeric polypeptide comprises (i) a first ligand binding region; and (ii) a MyD88 polypeptide region or a truncated MyD88 polypeptide region lacking the TIR domain; and
[0843] b) a second polynucleotide encoding a second chimeric polypeptide, wherein the second chimeric polypeptide comprises a pro-apoptotic polypeptide region and a second ligand binding region, wherein the second ligand binding region has a different amino acid sequence than the first ligand binding region;
[0844] wherein
[0845] the first and second ligand binding regions are capable of binding to a first ligand;
[0846] the first ligand binding region is capable of binding to a second ligand; and
[0847] the second ligand does not significantly bind to the second ligand binding region.
[0848] C3. Reserved.
[0849] C4. The modified cell of any one of embodiments C1-C2, wherein the second ligand is not capable of binding to the second ligand binding region.
[0850] C5. The modified cell of any one of embodiments C1-C4, wherein the modified cell further comprises a third polynucleotide encoding a marker polypeptide.
[0851] C6. The modified cell of any one of embodiments C1-C4, wherein the first chimeric polypeptide further comprises a marker polypeptide.
[0852] C7. The modified cell of any one of embodiments C1-C4, wherein the second chimeric polypeptide further comprises a marker polypeptide.
[0853] C8. The modified cell of embodiment C7, wherein the marker polypeptide is a ΔCD19 polypeptide.
[0854] C9. The modified cell of any one of embodiments C1-C8, wherein the first chimeric polypeptide further comprises a membrane-targeting region.
[0855] C10. The modified cell of embodiment C9, wherein the membrane-targeting region is selected from the group consisting of a myristoylation region, palmitoylation region, prenylation region, NKG2D receptor, and transmembrane sequences of receptors.
[0856] C11. The modified cell of embodiment 010, wherein the membrane-targeting region is a myristoylation region.
[0857] C12. The modified cell of embodiment C11, wherein the myristoylation region has an amino acid sequence of SEQ ID NO: 3 or a functional fragment thereof.
[0858] C13. The modified cell of any one of embodiments C1-C12, wherein the first ligand binding region is an FKBP12 region.
[0859] C14. The modified cell of embodiment C13, wherein the FKBP12 region has an amino acid substitution at position 36 selected from the group consisting of valine, leucine, isoleuceine and alanine.
[0860] C15. The modified cell of embodiment C13, wherein the first ligand binding region is an FKBP12v36 region.
[0861] C16. The modified cell of any one of embodiments C1-C12, wherein the first ligand binding region comprises two or more ligand binding regions.
[0862] C17. The modified cell of embodiment C16, wherein the two or more ligand binding regions are each an FKBP12 region.
[0863] C18. The modified cell of embodiments C17, wherein at least one FKBP12 region has an amino acid substitution at position 36 selected from the group consisting of valine, leucine, isoleuceine and alanine.
[0864] C19. The modified cell of embodiment C17, wherein at least one ligand binding region is an FKBP12v36 region.
[0865] C20. The modified cell of any one of embodiments C1-C19, wherein the second ligand binding region is an FRB region.
[0866] C21. The modified cell of embodiment C20, wherein the second ligand binding region is a FKBP12-Rapamycin Binding domain (FRB).
[0867] C22. The modified cell of embodiment C20, wherein the FRB region is selected from the group consisting of KLW (T2098L), KTF (W2101F), and KLF (T2098L, W2101F).
[0868] C23. The modified cell of any one of embodiments C1-C22, wherein the first ligand is rapamycin or a rapalog.
[0869] C24. The modified cell of embodiment C23, wherein the rapalog is selected from the group consisting of S-o,p-dimethoxyphenyl (DMOP)-rapamycin, R-Isopropoxyrapamycin, and S-Butanesulfonamidorap.
[0870] C25. The modified cell of any one of embodiments C1-C23, wherein the second ligand is AP1903, AP20187, or AP1510.
[0871] C26. The modified cell of any one of embodiments C1-C25, wherein the promoter is operably linked to the first polynucleotide and the second polynucleotide.
[0872] C27. The modified cell of any one of embodiments C1-C26, wherein the promoter is developmentally regulated.
[0873] C28. The modified cell of any one of embodiments C1-C27, wherein the promoter is tissue-specific.
[0874] C29. The modified cell of any one of embodiments C1-C26, wherein the promoter is activated in activated T cells.
[0875] C30. The modified cell of any one of embodiments C1-C29, wherein the pro-apoptotic polypeptide is selected from the group consisting of caspase 1, 2, 3, 4, 5, 6, 7, 8, 9, 10, 11, 12, 13, or 14, FADD (DED), APAF1 (CARD), CRADD/RAIDD CARD), ASC (CARD), Bax, Bak, Bcl-xL, Bcl-2, RIPK3, and RIPK1-RHIM.
[0876] C31. The modified cell of any one of embodiments C1-C29, wherein the pro-apoptotic polypeptide is a caspase polypeptide.
[0877] C32. The modified cell of any one of embodiments C1-C29, wherein the pro-apoptotic polypeptide is a Caspase-9 polypeptide.
[0878] C33. The modified cell of any one of embodiments C31-C32, wherein the caspase polypeptide comprises the amino acid sequence of SEQ ID NO: 300.
[0879] C34. The modified cell of any one of embodiments C31-C32, wherein the caspase polypeptide is a modified Caspase-9 polypeptide comprising an amino acid substitution selected from the group consisting of the catalytically active caspase variants in Tables 5 or 6.
[0880] C35. The modified cell of any one of embodiments C31-C32, wherein the caspase polypeptide is a modified Caspase-9 polypeptide comprising an amino acid sequence selected from the group consisting of D330A, D330E, and N405Q.
[0881] C36. The modified cell of any one of embodiments C1-C2, or C4-C35, wherein the truncated MyD88 polypeptide has the amino acid sequence of SEQ ID NO: 214, or a functional fragment thereof.
[0882] C37. The modified cell of any one of embodiments C1 or C3-C36, wherein the cytoplasmic CD40 polypeptide has the amino acid sequence of SEQ ID NO: 216, or a functional fragment thereof.
[0883] C38. The modified cell of any one of embodiments C1-C37, wherein the first chimeric polypeptide further comprises a chimeric antigen receptor.
[0884] C39. The modified cell of any one of embodiments C1-C37, wherein the modified cell further comprises a polynucleotide encoding a chimeric antigen receptor.
[0885] C40. The modified cell of any one of embodiments C1-37, wherein the first chimeric polypeptide further comprises a T cell receptor, or a T cell receptor-based chimeric antigen receptor.
[0886] C40.1. The modified cell of embodiment C40, wherein the T cell receptor binds to an antigenic polypeptide selected from the group consisting of PRAME, Bob-1, and NY-ESO-1.
[0887] C41. The modified cell of any one of embodiments C1-C37, wherein the modified cell further comprises a polynucleotide encoding a T cell receptor or a T cell receptor-based chimeric antigen receptor.
[0888] C41.1. The modified cell of embodiment C41, wherein the T cell receptor binds to an antigenic polypeptide selected from the group consisting of PRAME, Bob-1, and NY-ESO-1.
[0889] C42. The modified cell of any one of embodiments C38-C41, wherein the chimeric antigen receptor comprises (i) a transmembrane region, (ii) a T cell activation molecule, and (iii) an antigen recognition moiety.
[0890] C43. The modified cell of embodiment C42, wherein the antigen recognition moiety is a single chain variable fragment that binds to CD19.
[0891] C44. The modified cell of any one of embodiments C42-C43, wherein the antigen recognition moiety is a single chain variable fragment that binds to PSCA.
[0892] C45. The modified cell of any one of embodiments C42-C43, wherein the antigen recognition moiety is a single chain variable fragment that binds to Her2/Neu.
[0893] C46. The modified cell of any one of embodiments C42-C45, wherein the T cell activation molecule is an ITAM-containing, Signal 1 conferring molecule.
[0894] C47. The modified cell of any one of embodiments C42-C45, wherein the T cell activation molecule is a CD3 ζ polypeptide.
[0895] C48. The modified cell of any one of embodiments C42-C45, wherein the T cell activation molecule is an Fc epsilon receptor gamma (FcεR1γ) subunit polypeptide.
[0896] C49. The modified cell of any one of embodiments C42 or C45-C48, wherein the antigen recognition moiety binds to an antigen on a tumor cell.
[0897] C50. The modified cell of any one of embodiments C42 or C45-C48, wherein the antigen recognition moiety binds to an antigen on a cell involved in a hyperproliferative disease.
[0898] C51. The modified cell of any one of embodiments C42 or C45-C48, wherein the antigen recognition moiety binds to an antigen selected from the group consisting of PSMA, PSCA, CD19, ROR1, Mesothelin, GD2, CD123, Muc16, and Her2/Neu.
[0899] C52. The modified cell of any one of embodiments C42 or C45-C48, wherein the antigen recognition moiety binds to a viral or bacterial antigen.
[0900] C53. The modified cell of any one of embodiments C42 or C45-C48, wherein the antigen recognition moiety is a single chain variable fragment.
[0901] C54. The modified cell of any one of embodiments C42-053, wherein the transmembrane region is a CD8 transmembrane region.
[0902] D1. The modified cell of any one of embodiments B1, or C1-C54, wherein the cell is a T cell, tumor infiltrating lymphocyte, NK-T cell, or NK cell.
[0903] D3. The modified cell of any one of embodiments B1, or C1-C54, wherein the cell is a T cell.
[0904] D4. The modified cell of any one of embodiments B1, or C1-C54, wherein the cell is a primary T cell.
[0905] D5. The modified cell of any one of embodiments B1, or C1-C54, wherein the cell is a cytotoxic T cell.
[0906] D6. The modified cell of any one of embodiments B1, or C1-C54, wherein the cell is selected from the group consisting of embryonic stem cell (ESC), induced pluripotent stem cell (iPSC), non-lymphocytic hematopoietic cell, non-hematopoietic cell, macrophage, keratinocyte, fibroblast, melanoma cell, tumor infiltrating lymphocyte, natural killer cell, natural killer T cell, or T cell.
[0907] D7. The method of embodiment D3, wherein the T cell is a helper T cell.
[0908] D8. The modified cell of any one of embodiments D1-D7, wherein the cell is obtained or prepared from bone marrow.
[0909] D9. The modified cell of any one of embodiments D1-D7, wherein the cell is obtained or prepared from umbilical cord blood.
[0910] D10. The modified cell of any one of embodiments D1-D7, wherein the cell is obtained or prepared from peripheral blood.
[0911] D11. The modified cell of any one of embodiments D1-D7, wherein the cell is obtained or prepared from peripheral blood mononuclear cells.
[0912] D12. The modified cell of any one of embodiments D1-D7, wherein the cell is a human cell.
[0913] D13. The method of any one of embodiments D1-D12, wherein the modified cell is transduced or transfected in vivo.
[0914] D14. The modified cell of any one of embodiments D1-D7, wherein the cell is transfected or transduced by the nucleic acid vector using a method selected from the group consisting of electroporation, sonoporation, biolistics (e.g., Gene Gun with Au-particles), lipid transfection, polymer transfection, nanoparticles, or polyplexes.
[0915] E1. A method of stimulating an immune response in a subject, comprising:
[0916] a) transplanting modified cells of any one of embodiments B1-D15 into the subject; and
[0917] b) after (a), administering an effective amount of the second ligand to stimulate a cell mediated immune response.
[0918] E1.1. A method of administering a ligand to a human subject who has undergone cell therapy using modified cells, comprising administering the second ligand to the human subject, wherein the modified cells comprise a nucleic acid of any one of embodiments A1-A88.
[0919] E1.2. A method of administering rapamycin or a rapalog to a human subject who has undergone cell therapy using modified cells, comprising administering rapamycin or a rapalog to the human subject, wherein the modified cells comprise a nucleic acid of any one of embodiments A1-A88.
[0920] E2. A method of controlling activity of transplanted modified cells in a subject, comprising:
[0921] a) transplanting modified cells of any one of embodiments B1-D15 into the subject; and
[0922] b) after (a), administering an effective amount of the second ligand to stimulate the activity of the transplanted modified cells.
[0923] E3. The method of any one of embodiments E1-E2, further comprising after (b), administering to the subject the first ligand in an amount effective to kill less than 30% of the modified cells that express the second chimeric polypeptide.
[0924] E4. The method of any one of embodiments E1-E2, further comprising after (b), administering to the subject the first ligand in an amount effective to kill less than 40% of the modified cells that express the second chimeric polypeptide.
[0925] E5. The method of any one of embodiments E1-E2, further comprising after (b), administering to the subject the first ligand in an amount effective to kill less than 50% of the modified cells that express the second chimeric polypeptide.
[0926] E6. The method of any one of embodiments E1-E2, further comprising, after (b), administering to the subject rapamycin or a rapalog in an amount effective to kill less than 60% of the modified cells that express the second chimeric polypeptide.
[0927] E7. The method of any one of embodiments E1-E2, further comprising after (b), administering to the subject the first ligand in an amount effective to kill less than 70% of the modified cells that express the second chimeric polypeptide.
[0928] E8. The method of any one of embodiments E1-E2, further comprising after (b), administering to the subject the first ligand in an amount effective to kill less than 90% of the modified cells that express the second chimeric polypeptide.
[0929] E9. The method of any one of embodiments E1-E2, further comprising after (b), administering to the subject the first ligand in an amount effective to kill at least 90% of the modified cells that express the second chimeric polypeptide.
[0930] E10. The method of any one of embodiments E1-E2, further comprising after (b), administering to the subject the first ligand in an amount effective to kill at least 95% of the modified cells that express the second chimeric polypeptide.
[0931] E11. A method for treating a subject having a disease or condition associated with an elevated expression of a target antigen expressed by a target cell, comprising
[0932] (a) administering to the subject an effective amount of a modified cell of any one of embodiments B1-D14, wherein the cell comprises a chimeric antigen receptor comprising an antigen recognition moiety that binds to the target antigen, and
[0933] (b) after a), administering an effective amount of the second ligand to reduce the number or concentration of target antigen or target cells in the subject.
[0934] E12. The method of embodiment E11, wherein the target antigen is a tumor antigen.
[0935] E12.1 A method for treating a subject having a disease or condition associated with an elevated expression of a target antigen expressed by a target cell, comprising
[0936] (a) administering to the subject an effective amount of a modified cell of any one of embodiments B1-D14, wherein the cell comprises a chimeric T cell receptor that recognizes and binds to the target antigen, and
[0937] (b) after a), administering an effective amount of the second ligand to reduce the number or concentration of target antigen or target cells in the subject.
[0938] E12.2. The method of embodiment E12.1, wherein the target antigen is Bob-1, PRAME, or NY-ESO-1.
[0939] E13. A method for reducing the size of a tumor in a subject, comprising
[0940] a) administering a modified cell of any one of embodiments B1-D14 to the subject, wherein the cell comprises a chimeric antigen receptor comprising an antigen recognition moiety that binds to an antigen on the tumor; and
[0941] b) after a), administering an effective amount of the second ligand to reduce the size of the tumor in the subject.
[0942] E14. The method of any one of embodiments E1-E3, wherein the subject has cancer.
[0943] E15. The method of any one of embodiments E1-E14, wherein the modified cell is delivered to a tumor bed.
[0944] E16. The method of embodiment E14, wherein the cancer is present in the blood or bone marrow of the subject.
[0945] E17. The method of embodiment E11, wherein the subject has a blood or bone marrow disease.
[0946] E18. The method of embodiment E11, wherein the subject has been diagnosed with sickle cell anemia or metachromatic leukodystrophy.
[0947] E19. The method of embodiments E11, wherein the patient has been diagnosed with a condition selected from the group consisting of a primary immune deficiency condition, hemophagocytosis lymphohistiocytosis (HLH) or other hemophagocytic condition, an inherited marrow failure condition, a hemoglobinopathy, a metabolic condition, and an osteoclast condition.
[0948] E20. The method of embodiment E11, wherein the disease or condition is selected from the group consisting of Severe Combined Immune Deficiency (SCID), Combined Immune Deficiency (CID), Congenital T-cell Defect/Deficiency, Common Variable Immune Deficiency (CVID), Chronic Granulomatous Disease, IPEX (Immune deficiency, polyendocrinopathy, enteropathy, X-linked) or IPEX-like, Wiskott-Aldrich Syndrome, CD40 Ligand Deficiency, Leukocyte Adhesion Deficiency, DOCA 8 Deficiency, IL-10 Deficiency/IL-10 Receptor Deficiency, GATA 2 deficiency, X-linked lymphoproliferative disease (XLP), Cartilage Hair Hypoplasia, Shwachman Diamond Syndrome, Diamond Blackfan Anemia, Dyskeratosis Congenita, Fanconi Anemia, Congenital Neutropenia, Sickle Cell Disease, Thalassemia, Mucopolysaccharidosis, Sphingolipidoses, and Osteopetrosis.
[0949] E21. The method of any one of embodiments E11-E20, wherein the number or concentration of target cells in the subject is reduced following administration of the second ligand.
[0950] E22. The method of any one of embodiments E11-E21, comprising measuring the number or concentration of target cells in a first sample obtained from the subject before administering second ligand, measuring the number or concentration of target cells in a second sample obtained from the subject after administering the second ligand, and determining an increase or decrease of the number or concentration of target cells in the second sample compared to the number or concentration of target cells in the first sample.
[0951] E23. The method of embodiment E22, wherein the concentration of target cells in the second sample is decreased compared to the concentration of target cells in the first sample.
[0952] E24. The method of embodiment E22, wherein the concentration of target cells in the second sample is increased compared to the concentration target cells in the first sample.
[0953] E25. The method of any one of embodiments E1-E24, wherein the second ligand is selected from the group consisting of AP1903, AP20187, and AP1510.
[0954] E26. The method of any one of embodiments E1-E1.1, or E2-E25, wherein the first ligand is rapamycin or a rapalog.
[0955] E27. The method of embodiment E25, wherein the rapalog is selected from the group consisting of S-o,p-dimethoxyphenyl (DMOP)-rapamycin, R-Isopropoxyrapamycin, and S-Butanesulfonamidorap.
[0956] E28. The method of any one of embodiments E1-E27, further comprising administering the first ligand to the subject in an amount effective to kill at least 90% of the modified cells that express the second chimeric polypeptide.
[0957] E29. The method of embodiment E28, wherein more than one dose of the ligand, rapamycin, or the rapalog is administered.
[0958] E30. The method of any one of embodiments E1-E27, further comprising identifying a presence or absence of a condition in the subject that requires the removal of the modified cells from the subject; and administering the first ligand, maintaining a subsequent dosage of the first ligand, or adjusting a subsequent dosage of the first ligand to the subject based on the presence or absence of the condition identified in the subject.
[0959] E31. The method of any one of embodiments E1-E27, further comprising
[0960] receiving information comprising presence or absence of a condition in the subject that requires the removal of the modified cells from the subject; and
[0961] administering the first ligand, maintaining a subsequent dosage of the first ligand, or adjusting a subsequent dosage of the first ligand to the subject based on the presence or absence of the condition identified in the subject.
[0962] E32. The method of any one of embodiments E1-E27, further comprising
[0963] identifying a presence or absence of a condition in the subject that requires the removal of the modified cells from the subject; and
[0964] transmitting the presence, absence or stage of the condition identified in the subject to a decision maker who administers the first ligand, maintains a subsequent dosage of the first ligand, or
[0965] adjusts a subsequent dosage of the first ligand administered to the subject based on the presence, absence or stage of the condition identified in the subject.
[0966] E33. The method of any one of embodiments E28-E33, further comprising
[0967] identifying a presence or absence of a condition in the subject that requires the removal of the modified cells from the subject; and
[0968] transmitting an indication to administer the first ligand, maintain a subsequent dosage of the first ligand, or adjust a subsequent dosage of the first ligand administered to the subject based on the presence, absence or stage of the condition identified in the subject.
[0969] E34. Reserved.
[0970] E35. The method of any one of embodiments E1-E34, wherein the subject has received a stem cell transplant before or at the same time as administration of the modified cells.
[0971] E36. The method of any one of embodiments E1-E34, wherein at least 1×10⁶ transduced or transfected modified cells are administered to the subject.
[0972] E37. The method of any one of embodiments E1-E34, wherein at least 1×10⁷ transduced or transfected modified cells are administered to the subject.
[0973] E38. The method of any one of embodiments E1-E35, wherein at least 1×10⁸ modified cells are administered to the subject.

### Example 26

### Additional Representative Embodiments

[0974] Provided hereafter are examples of certain embodiments of the technology.
[0975] A1. A modified cell, comprising
   [0976] a) a first polynucleotide encoding a first chimeric polypeptide, wherein the first chimeric polypeptide comprises a scaffold region comprising at least two first ligand binding regions; and
   [0977] b) a second polynucleotide encoding a second chimeric polypeptide, wherein the second chimeric polypeptide comprises a pro-apoptotic polypeptide region and a second ligand binding region, wherein the second ligand binding region has a different amino acid sequence than the first ligand binding region;
      wherein the first and second ligand binding regions are capable of binding to a first ligand.
[0978] A2 The modified cell of embodiment A1, wherein the second ligand binding region is capable of binding to the first ligand and is capable of binding to a second ligand.
[0979] A3. The modified cell of embodiment A2, wherein the second ligand does not significantly bind to the first ligand binding regions.
[0980] A4 The modified cell of any one of embodiments A1-A2, wherein the first ligand binding regions are not capable of binding to the second ligand.
[0981] A5. The modified cell of embodiment A1, wherein the first ligand binding region is capable of binding to the first ligand and is capable of binding to a second ligand.
[0982] A6. The modified cell of embodiment A5, wherein the second ligand does not significantly bind to the second ligand binding region.
[0983] A7. The modified cell of embodiment A5, wherein the second ligand binding region is not capable of binding to the second ligand.
[0984] A8. The modified cell of any one of embodiments A1-A7, wherein the first chimeric polypeptide further comprises a membrane-targeting polypeptide region.
[0985] A9. The modified cell of any one of embodiments A1-A8, wherein the first chimeric polypeptide further comprises an antigen recognition moiety.
[0986] A10. The modified cell of any one of embodiments A1-A9, wherein the first chimeric polypeptide further comprises a marker polypeptide.
[0987] All. The modified cell of any one of embodiments A1-A9, wherein the first chimeric polypeptide further comprises a T cell receptor.
[0988] A12. The modified cell of any one of embodiments A1-A9, wherein the first chimeric polypeptide further comprises a chimeric antigen receptor.
[0989] A13. The modified cell of embodiment A12, wherein the chimeric antigen receptor comprises (i) a transmembrane region, (ii) a T cell activation molecule, and (iii) an antigen recognition moiety.
[0990] A14. The modified cell of embodiment A12, wherein the chimeric antigen receptor comprises (i) a transmembrane region, (ii) a MyD88 polypeptide or a truncated MyD88 polypeptide lacking a TIR domain, (iii) a CD40 cytoplasmic polypeptide region lacking a CD40 extracellular domain and (iv) a T cell activation molecule, (v) an antigen recognition moiety.
[0991] A15. The modified cell of any one of embodiments A1-A9, wherein the first chimeric polypeptide further comprises (i) a MyD88 polypeptide or a truncated MyD88 polypeptide lacking a TIR domain, and (ii) a CD40 cytoplasmic polypeptide region lacking a CD40 extracellular domain.
[0992] A16. The modified cell of any one of embodiments A1-A9, wherein the first chimeric polypeptide further comprises a MyD88 polypeptide or a truncated MyD88 polypeptide lacking a TIR domain.
[0993] A17. The modified cell of any one of embodiments A1-A9, wherein the first chimeric polypeptide further comprises a CD40 cytoplasmic polypeptide region lacking a CD40 extracellular domain.
[0994] A18. The modified cell of any one of embodiments A1-A17, wherein the first ligand is rapamycin or a rapalog.

[0995] A19. The modified cell of any one of embodiments A1-A18, wherein the second ligand is selected from the group consisting of AP1903, AP20187, and AP1510.
[0996] A20. The modified cell of any one of embodiments A1-A4 or A8-A19, wherein the first ligand binding regions are FRB regions.
[0997] A21. The modified cell of any one of embodiments A1-A4 or A8-A20, wherein the second ligand binding region is an FKBP12 region.
[0998] A22. The modified cell of any one of embodiments A5-A19, wherein the first ligand binding regions are FKBP12 regions.
[0999] A23. The modified cell of any one of embodiments A5-A19 or A22, wherein the second ligand binding region is an FRB region.
[1000] A24. The modified cell of any one of embodiments A1-A13 or A15-A23, wherein the cell further comprises a nucleic acid coding for a chimeric antigen receptor.
[1001] A25. The modified cell of any one of embodiments A1-A24, wherein the scaffold region comprises at least three first ligand binding regions.
[1002] A26. The modified cell of any one of embodiments A1-A24, wherein the scaffold region comprises at least four first ligand binding regions.
[1003] A27. The modified cell of any one of embodiments A1-A24, wherein the scaffold region comprises at least five first ligand binding regions.
[1004] A28. The modified cell of any one of embodiments A1-A24, wherein the scaffold region comprises 6-10 first ligand binding regions.
[1005] A29. The modified cell of any one of embodiments A18-A28, wherein the rapalog is selected from the group consisting of S-o,p-dimethoxyphenyl (DMOP)-rapamycin, R-Isopropoxyrapamycin, and S-Butanesulfonamidorap.
[1006] A30. The modified cell of any one of embodiments A1-A20, or A24-A29, wherein the scaffold comprises at least two FKBP12-Rapamycin Binding domains (FRB_{L}).
[1007] A31. The modified cell of embodiment A30, wherein the scaffold comprises at least three FRB_{L} domains.
[1008] A32. The modified cell of embodiment A30, wherein the first ligand binding region comprises at least four FRB_{L} domains.
[1009] A33. The modified cell of any one of embodiments A20-A32, wherein the FRB regions are selected from the group consisting of KLW (T2098L), KTF (W2101F), and KLF (T2098L, W2101F).
[1010] A34. The modified cell of any one of embodiments A21-A33, wherein the FKBP12 region comprises a FKBPv36 ligand binding region.
[1011] A35. The modified cell of any one of embodiments A21-A33, wherein the FKBP12 region has an amino acid substitution at position 36 selected from the group consisting of valine, leucine, isoleuceine and alanine.
[1012] A36. The modified cell of any one of embodiments A1-A35, wherein the cell is a T cell, tumor infiltrating lymphocyte, NK-T cell, TCR-expressing cell, or NK cell.
[1013] A37. The modified cell of any one of embodiments A1-A36, wherein the cell is obtained or prepared from bone marrow.
[1014] A38. The modified cell of any one of embodiments A1-A36, wherein the cell is obtained or prepared from umbilical cord blood.
[1015] A39. The modified cell of any one of embodiments A1-A36, wherein the cell is obtained or prepared from peripheral blood.
[1016] A40. The modified cell of any one of embodiments A1-A36, wherein the cell is obtained or prepared from peripheral blood mononuclear cells.
[1017] A41. The modified cell of any one of embodiments A1-A36, wherein the cell further comprises a promoter operatively liked to the first polynucleotide.
[1018] A42. The modified cell of embodiment A41, wherein the promoter is operatively linked to the second polynucleotide.
[1019] A43. The modified cell of any one of embodiments A41-A42, wherein the promoter is developmentally regulated and the caspase-9 polypeptide is expressed in developmentally differentiated cells.
[1020] A44. The modified cell of any one of embodiments A41-A42, wherein the promoter is tissue-specific and the caspase-9 polypeptide is expressed in the specific tissue.
[1021] A45. The modified cell of any one of embodiments A41-A42, wherein the promoter is activated in activated T cells.
[1022] A46. The modified cell of any one of embodiments A1-A45, wherein the pro-apoptotic polypeptide is selected from the group consisting of caspase 1, 2, 3, 4, 5, 6, 7, 8, 9, 10, 11, 12, 13, or 14, FADD (DED), APAF1 (CARD), CRADD/RAIDD CARD), ASC (CARD), Bax, Bak, Bcl-xL, Bcl-2, RIPK3, and RIPK1-RHIM.
[1023] A47. The modified cell of any one of embodiments A1-A45, wherein the pro-apoptotic polypeptide is a caspase polypeptide.
[1024] A48. The modified cell of any one of embodiments A1-A45, wherein the pro-apoptotic polypeptide is a Caspase-9 polypeptide.
[1025] A49. The modified cell of any one of embodiments A47-A48, wherein the caspase polypeptide comprises the amino acid sequence of SEQ ID NO: 300.
[1026] A50. The modified cell of any one of embodiments A47-A48, wherein the caspase polypeptide is a modified Caspase-9 polypeptide comprising an amino acid substitution selected from the group consisting of the catalytically active caspase variants in Tables 5 or 6.
[1027] A51. The modified cell of any one of embodiments A47-A48, wherein the caspase polypeptide is a modified Caspase-9 polypeptide comprising an amino acid sequence selected from the group consisting of D330A, D330E, and N405Q.
[1028] A52. The modified cell of any one of embodiments A14-A50, wherein the truncated MyD88 polypeptide has the amino acid sequence of SEQ ID NO: 214, or a functional fragment thereof.
[1029] A53. The modified cell of any one of embodiments A14-A52, wherein the cytoplasmic CD40 polypeptide has the amino acid sequence of SEQ ID NO: 216, or a functional fragment thereof.
[1030] A54. The modified cell of any one of embodiments A9-A52, wherein the antigen recognition moiety is a single chain variable fragment that binds to CD19.
[1031] A55. The modified cell of any one of embodiments A9-A52, wherein the antigen recognition moiety is a single chain variable fragment that binds to PSCA.
[1032] A56. The modified cell of any one of embodiments A9-A52, wherein the antigen recognition moiety is a single chain variable fragment that binds to Her2/Neu.
[1033] A57. The modified cell of any one of embodiments A1-A56, wherein the cell is a T cell.
[1034] A58. The modified cell of any one of embodiments A1-A56, wherein the cell is a natural killer cell.
[1035] A59. The modified cell of any one of embodiments A8-A58, wherein the membrane-associated polypeptide region is an NKG2D receptor.
[1036] A60. The modified cell of any one of embodiments A8-A58, wherein the membrane-targeting polypeptide region is selected from the group consisting of a myristoylation region, palmitoylation region, prenylation region, and transmembrane sequences of receptors.
[1037] A61. The modified cell of any one of embodiments A8-A58, wherein the membrane-targeting polypeptide region is a myristoylation region.
[1038] A62. The modified cell of embodiment A61, wherein the myristoylation region has an amino acid sequence of SEQ ID NO: 3 or a functional fragment thereof.
[1039] A63. The modified cell of any one of embodiments A13-A62, wherein the T cell activation molecule is an ITAM-containing, Signal 1 conferring molecule.
[1040] A64. The modified cell of any one of embodiments A13-A62, wherein the T cell activation molecule is a CD3 ζ polypeptide.
[1041] A65. The modified cell of any one of embodiments A13-A62, wherein the T cell activation molecule is an Fc epsilon receptor gamma (FcεR1γ) subunit polypeptide.
[1042] A66. The modified cell of any one of embodiments A9-A65, wherein the antigen recognition moiety binds to an antigen on a tumor cell.
[1043] A67. The modified cell of any one of embodiments A9-A65, wherein the antigen recognition moiety binds to an antigen on a cell involved in a hyperproliferative disease.
[1044] A68. The modified cell of any one of embodiments A9-A65, wherein the antigen recognition moiety binds to an antigen selected from the group consisting of PSMA, PSCA, Muc1, CD19, ROR1, Mesothelin, GD2, CD123, Muc16, and Her2/Neu.
[1045] A69. The modified cell of any one of embodiments A9-A65, wherein the antigen recognition moiety binds to a viral or bacterial antigen.
[1046] A70. The modified cell of any one of embodiments A9-A65, wherein the antigen recognition moiety is a single chain variable fragment.
[1047] A71. The modified cell of any one of embodiments A13-A70, wherein the transmembrane region is a CD8 transmembrane region.
[1048] B1. A nucleic acid comprising a promoter, operably linked to a polynucleotide encoding a first chimeric polypeptide, wherein the first chimeric polypeptide comprises a scaffold region comprising at least two first ligand binding regions.
[1049] B2. The nucleic acid of embodiment B1, further comprising a second polynucleotide encoding a second chimeric polypeptide, wherein the second chimeric polypeptide comprises a pro-apoptotic polypeptide region and a second ligand binding region, wherein the second ligand binding region has a different amino acid sequence than the first ligand binding region;
   wherein the first and second ligand binding regions are capable of binding to a first ligand.
[1050] B3 The nucleic acid of embodiment B2, further comprising a promoter operably linked to the second polynucleotide.
[1051] B4. The nucleic acid of embodiment B2, wherein the promoter is operably linked to the first polynucleotide and the second polynucleotide.
[1052] B8. The nucleic acid of embodiment B7, wherein the second ligand does not significantly bind to the first ligand binding regions.
[1053] B9 The modified cell of any one of embodiments B2-B7, wherein the first ligand binding regions are not capable of binding to the second ligand.
[1054] B10. The nucleic acid of any one of embodiments B2-B6, wherein the first ligand binding region is capable of binding to the first ligand and is capable of binding to a second ligand.
[1055] B11. The nucleic acid of embodiment B10, wherein the second ligand does not significantly bind to the second ligand binding region.
[1056] B12. The nucleic acid of embodiment B10, wherein the second ligand binding region is not capable of binding to the second ligand.
[1057] B13. The nucleic acid of any one of embodiments B1-B12, wherein the first chimeric polypeptide further comprises a membrane-targeting polypeptide region.
[1058] B14. The nucleic acid of any one of embodiments B1-B14, wherein the first chimeric polypeptide further comprises an antigen recognition moiety.
[1059] B15. The nucleic acid of any one of embodiments B1-B14, wherein the first chimeric polypeptide further comprises a marker polypeptide.
[1060] B16. The nucleic acid of any one of embodiments B1-B14, wherein the first chimeric polypeptide further comprises a T cell receptor.
[1061] B17. The nucleic acid of embodiment B16,
[1062] B17. The nucleic acid of any one of embodiments B1-B14, wherein the first chimeric polypeptide further comprises a chimeric antigen receptor.
[1063] B18. The nucleic acid of embodiment B17, wherein the chimeric antigen receptor comprises (i) a transmembrane region, (ii) a T cell activation molecule, and (iii) an antigen recognition moiety.
[1064] B19. The nucleic acid of embodiment B17, wherein the chimeric antigen receptor comprises (i) a transmembrane region, (ii) a MyD88 polypeptide or a truncated MyD88 polypeptide lacking a TIR domain, (iii) a CD40 cytoplasmic polypeptide region lacking a CD40 extracellular domain and (iv) a T cell activation molecule, (v) an antigen recognition moiety.
[1065] B20. The nucleic acid of any one of embodiments B1-B14, wherein the first chimeric polypeptide further comprises (i) a MyD88 polypeptide or a truncated MyD88 polypeptide lacking a TIR domain, and (ii) a CD40 cytoplasmic polypeptide region lacking a CD40 extracellular domain.
[1066] B21. The nucleic acid of any one of embodiments B1-B14, wherein the first chimeric polypeptide further comprises a MyD88 polypeptide or a truncated MyD88 polypeptide lacking a TIR domain.
[1067] B22. The nucleic acid of any one of embodiments B1-B14, wherein the first chimeric polypeptide further comprises a CD40 cytoplasmic polypeptide region lacking a CD40 extracellular domain.
[1068] B23. The nucleic acid of any one of embodiments B1-B22, wherein the first ligand is rapamycin or a rapalog.
[1069] B24. The nucleic acid of any one of embodiments B1-B23, wherein the second ligand is selected from the group consisting of AP1903, AP20187, and AP1510.
[1070] B25. The nucleic acid of any one of embodiments B1-B9 or B13-B24, wherein the first ligand binding regions are FRB regions.
[1071] B26. The nucleic acid of any one of embodiments B1-B9 or B13-B24, wherein the second ligand binding region is an FKBP12 region.
[1072] B27. The nucleic acid of any one of embodiments B10-B24, wherein the first ligand binding regions are FKBP12 regions.
[1073] B28. The nucleic acid of any one of embodiments B10-B24 or B27, wherein the second ligand binding region is an FRB region.
[1074] B29. The nucleic acid of any one of embodiments B1-B28, wherein the scaffold region comprises at least three first ligand binding regions.
[1075] B30. The nucleic acid of any one of embodiments B1-B28, wherein the scaffold region comprises at least four first ligand binding regions.
[1076] B31. The nucleic acid of any one of embodiments B1-B24, wherein the scaffold region comprises at least five first ligand binding regions.
[1077] B32. The nucleic acid of any one of embodiments B1-B24, wherein the scaffold region comprises 6-10 first ligand binding regions.
[1078] B33. The nucleic acid of any one of embodiments B23-B32, wherein the rapalog is selected from the group consisting of S-o,p-dimethoxyphenyl (DMOP)-rapamycin, R-Isopropoxyrapamycin, and S-Butanesulfonamidorap.
[1079] B34. The nucleic acid of any one of embodiments B1-B33, wherein the scaffold comprises at least two FKBP12-Rapamycin Binding domains (FRB_{L}).
[1080] B35. The nucleic acid of embodiment B34, wherein the scaffold comprises at least three FRB_{L} domains.
[1081] B36. The nucleic acid of embodiment B34, wherein the first ligand binding region comprises at least four FRB_{L} domains.
[1082] B37. The nucleic acid of any one of embodiments B25-B36, wherein the FRB regions are selected from the group consisting of KLW (T2098L), KTF (W2101F), and KLF (T2098L, W2101F).
[1083] B38. The nucleic acid of any one of embodiments B26-B37, wherein the FKBP12 region comprises a FKBPv36 ligand binding region.
[1084] B39. The nucleic acid of any one of embodiments B1-B38, wherein the promoter is developmentally regulated and the caspase-9 polypeptide is expressed in developmentally differentiated cells.
[1085] B40. The nucleic acid of any one of embodiments B1-B38, wherein the promoter is tissue-specific and the caspase-9 polypeptide is expressed in the specific tissue.
[1086] B41. The nucleic acid of any one of embodiments B1-B38, wherein the promoter is activated in activated T cells.
[1087] B42. The nucleic acid of any one of embodiments B2-B41, wherein the pro-apoptotic polypeptide is selected from the group consisting of caspase 1, 2, 3, 4, 5, 6, 7, 8, 9, 10, 11, 12, 13, or 14, FADD (DED), APAF1 (CARD), CRADD/RAIDD CARD), ASC (CARD), Bax, Bak, Bcl-xL, Bcl-2, RIPK3, and RIPK1-RHIM.
[1088] B43. The nucleic acid of any one of embodiments B1-B42, wherein the pro-apoptotic polypeptide is a caspase polypeptide.
[1089] B44. The nucleic acid of any one of embodiments B1-B43, wherein the pro-apoptotic polypeptide is a Caspase-9 polypeptide.
[1090] B45. The nucleic acid of any one of embodiments B43-B44, wherein the caspase polypeptide comprises the amino acid sequence of SEQ ID NO: 300.
[1091] B46. The nucleic acid of any one of embodiments B43-B44, wherein the caspase polypeptide is a modified Caspase-9 polypeptide comprising an amino acid substitution selected from the group consisting of the catalytically active caspase variants in Tables 5 or 6.
[1092] B47. The nucleic acid of any one of embodiments B43-B44, wherein the caspase polypeptide is a modified Caspase-9 polypeptide comprising an amino acid sequence selected from the group consisting of D330A, D330E, and N405Q.
[1093] B48. The nucleic acid of any one of embodiments B19-B47, wherein the truncated MyD88 polypeptide has the amino acid sequence of SEQ ID NO: 214, or a functional fragment thereof.
[1094] B49. The nucleic acid of any one of embodiments B19-B48, wherein the cytoplasmic CD40 polypeptide has the amino acid sequence of SEQ ID NO: 216, or a functional fragment thereof.
[1095] B50. The nucleic acid of any one of embodiments B14-B49, wherein the antigen recognition moiety is a single chain variable fragment that binds to CD19.
[1096] B51. The nucleic acid of any one of embodiments B14-B49, wherein the antigen recognition moiety is a single chain variable fragment that binds to PSCA.
[1097] B52. The nucleic acid of any one of embodiments B14-B49, wherein the antigen recognition moiety is a single chain variable fragment that binds to Her2/Neu.
[1098] B53. The nucleic acid of any one of embodiments B1-B56, wherein the cell is a T cell.
[1099] B54. The nucleic acid of any one of embodiments B1-B56, wherein the cell is a natural killer cell.
[1100] B55. The nucleic acid of any one of embodiments B13-B54, wherein the membrane-targeting polypeptide region is an NKG2D receptor.
[1101] B56. The nucleic acid of any one of embodiments B13-B54, wherein the membrane-targeting polypeptide region is selected from the group consisting of a myristoylation region, palmitoylation region, prenylation region, and transmembrane sequences of receptors.
[1102] B57. The nucleic acid of any one of embodiments B13-B54, wherein the membrane-targeting polypeptide region is a myristoylation region.
[1103] B58. The nucleic acid of embodiment B57, wherein the myristoylation region has an amino acid sequence of SEQ ID NO: 3 or a functional fragment thereof.
[1104] B59. The nucleic acid of any one of embodiments B18-B58 wherein the T cell activation molecule is an ITAM-containing, Signal 1 conferring molecule.
[1105] B60. The nucleic acid of any one of embodiments B18-B58, wherein the T cell activation molecule is a CD3 ζ polypeptide.
[1106] B61. The nucleic acid of any one of embodiments B18-B58, wherein the T cell activation molecule is an Fc epsilon receptor gamma (FcεR1γ) subunit polypeptide.
[1107] B62. The nucleic acid of any one of embodiments B14-B59, wherein the antigen recognition moiety binds to an antigen on a tumor cell.
[1108] B63. The nucleic acid of any one of embodiments B14-B59, wherein the antigen recognition moiety binds to an antigen on a cell involved in a hyperproliferative disease.
[1109] B64. The nucleic acid of any one of embodiments B14-B59, wherein the antigen recognition moiety binds to an antigen selected from the group consisting of PSMA, PSCA, Muc1, CD19, ROR1, Mesothelin, GD2, CD123, Muc16, and Her2/Neu.
[1110] B65. The nucleic acid of any one of embodiments B14-B59, wherein the antigen recognition moiety binds to a viral or bacterial antigen.
[1111] B66. The nucleic acid of any one of embodiments B14-B59, wherein the antigen recognition moiety is a single chain variable fragment.
[1112] B67. The nucleic acid of any one of embodiments B18-B70, wherein the transmembrane region is a CD8 transmembrane region.
[1113] B68. The nucleic acid of any one of embodiments B1-B67, wherein the nucleic acid is contained within a viral vector.
[1114] B69. The nucleic acid of embodiment B68, wherein the viral vector is a retroviral vector.
[1115] B70. The nucleic acid of embodiment B69, wherein the retroviral vector is a murine leukemia virus vector.
[1116] B71. The nucleic acid of embodiment B69, wherein the retroviral vector is an SFG vector.
[1117] B72. The nucleic acid of embodiment B68, wherein the viral vector is an adenoviral vector.
[1118] B73. The nucleic acid of embodiment B68, wherein the viral vector is a lentiviral vector.
[1119] B74. The nucleic acid of embodiment B68, wherein the viral vector is selected from the group consisting of adeno-associated virus (AAV), Herpes virus, and Vaccinia virus.
[1120] B75. The nucleic acid of any one of embodiments B1-B74, wherein the nucleic acid is prepared or in a vector designed for electroporation, sonoporation, or biolistics, or is attached to or incorporated in chemical lipids, polymers, inorganic nanoparticles, or polyplexes.
[1121] B76. The nucleic acid of any one of embodiments B1-B66, or B75, wherein the nucleic acid is contained within a plasmid.
[1122] B77. The nucleic acid of any one of embodiments B1-B76, comprising a polynucleotide coding for a polypeptide provided in the tables of Example 23.
[1123] B78. The nucleic acid of any one of embodiments B1-B76, comprising a polynucleotide coding for a polypeptide provided in the tables of Example 23 selected from group consisting of FKBPv36, FpK′, FpK, Fv, Fv′, FKBPpK′, FKBPpK″, and FKBPpK″.
[1124] B79. The nucleic acid of any one of embodiments B1-B76, comprising a polynucleotide coding for a polypeptide provided in the tables of Example 23 selected from group consisting of FKBPv36, FpK′, FpK, Fv, Fv′, FKBPpK′, FKBPpK″, and FKBPpK″.
[1125] B80. The nucleic acid of any one of embodiments B1-B76, comprising a polynucleotide coding for a polypeptide provided in the tables of Example 23 selected from group consisting of FKBPv36, FpK′, FpK, Fv, Fv′, FKBPpK′, FKBPpK″, and FKBPpK″.
[1126] B81. The nucleic acid of any one of embodiments B1-B80, comprising a polynucleotide coding for a polypeptide provided in the tables of Example 23 selected from group consisting of FRP5-VL, FRP5-VH, FMC63-VL, and FMC63-VH.
[1127] B82. The nucleic acid of embodiment B81, comprising a polynucleotide coding for FRP5-VL and FRP5-VH.
[1128] B83. The nucleic acid of embodiment B81, comprising a polynucleotide coding for FMC63-VL and FMC63-VH.
[1129] B84. The nucleic acid of any one of embodiments B1-B83, comprising a polynucleotide coding for a polypeptide provided in the tables of Example 23 selected from group consisting of MyD88L and MyD88.
[1130] B85. The nucleic acid of any one of embodiments B1-B84, comprising a polynucleotide coding for a ΔCaspase-9 polypeptide provided in the tables of Example 23.
[1131] B86. The nucleic acid of any one of embodiments B1-B85, comprising a polynucleotide coding for a ΔCD19 polypeptide provided in the tables of Example 23.
[1132] B87. The nucleic acid of any one of embodiments B1-B86, comprising a polynucleotide coding for a hCD40 polypeptide provided in the tables of Example 23.
[1133] B88. The nucleic acid of any one of embodiments B1-B87, comprising a polynucleotide coding for a CD3zeta polypeptide provided in the tables of Example 23.
[1134] C1. A modified cell, transfected or transduced with a nucleic acid of any one of embodiments B1-B88.
[1135] C2. The modified cell of any one of embodiments A1-A71, or C1 wherein the cell is a T cell, tumor infiltrating lymphocyte, NK-T cell, or NK cell.
[1136] C3. The modified cell of any one of embodiments A1-A71, or C1, wherein the cell is a T cell.
[1137] C4. The modified cell of any one of embodiments A1-A71, or C1, wherein the cell is a primary T cell.
[1138] C5. The modified cell of any one of embodiments A1-A71, or C1, wherein the cell is a cytotoxic T cell.
[1139] C6. The modified cell of any one of embodiments A1-A71, or C1, wherein the cell is selected from the group consisting of embryonic stem cell (ESC), induced pluripotent stem cell (iPSC), non-lymphocytic hematopoietic cell, non-hematopoietic cell, macrophage, keratinocyte, fibroblast, melanoma cell, tumor infiltrating lymphocyte, natural killer cell, natural killer T cell, or T cell.
[1140] C7. The method of any one of embodiments A1-A71, or C1, wherein the T cell is a helper T cell.
[1141] C8. The modified cell of any one of embodiments C1-C7, wherein the cell is obtained or prepared from bone marrow.
[1142] C9. The modified cell of any one of embodiments C1-C7, wherein the cell is obtained or prepared from umbilical cord blood.
[1143] C10. The modified cell of any one of embodiments C1-C7, wherein the cell is obtained or prepared from peripheral blood.
[1144] C11. The modified cell of any one of embodiments C1-C7, wherein the cell is obtained or prepared from peripheral blood mononuclear cells.
[1145] C12. The modified cell of any one of embodiments C1-C7, wherein the cell is a human cell.
[1146] C13. The method of any one of embodiments C1-C12, wherein the modified cell is transduced or transfected in vivo.
[1147] C14. The modified cell of any one of embodiments C1-C7, wherein the cell is transfected or transduced by the nucleic acid vector using a method selected from the group consisting of electroporation, sonoporation, biolistics (e.g., Gene Gun with Au-particles), lipid transfection, polymer transfection, nanoparticles, or polyplexes.
[1148] D1. A method of controlling survival of transplanted modified cells in a subject, comprising:
[1149] a) transplanting modified cells of any one of embodiments A1-A71 or C1-C14 into the subject; and
[1150] b) after (a), administering to the subject rapamycin or a rapalog, in an amount effective to kill less than 30% of the modified cells that express the second chimeric polypeptide comprising the pro-apoptotic polypeptide region.
[1151] D1.1. A method of administering rapamycin or a rapalog to a human subject who has undergone cell therapy using modified cells comprising administering rapamycin or a rapalog to the human subject, wherein the modified cells comprise a nucleic acid of any one of embodiments B1-B88, wherein the rapamycin or rapalog binds to a FRB region.
[1152] D2. The method of any one of embodiments D1 or D1.1, wherein the rapamycin or rapalog is administered in an amount effective to kill less than 40% of the modified cells that express the chimeric caspase polypeptide.
[1153] D3. The method of any one of embodiments D1 or D1.1, wherein the rapamycin or rapalog is administered in an amount effective to kill less than 50% of the modified cells that express the chimeric caspase polypeptide.
[1154] D4. The method of any one of embodiments D1 or D1.1, wherein the rapamycin or rapalog is administered in an amount effective to kill less than 60% of the modified cells that express the chimeric caspase polypeptide.
[1155] D5. The method of embodiments D1 or D1.1, wherein the rapamycin or rapalog is administered in an amount effective to kill less than 70% of the modified cells that express the chimeric caspase polypeptide.
[1156] D6. The method of any one of embodiments D1-D5, wherein the second ligand binding region is a FKBP12 region, further comprising administering a ligand that binds to the FKBP12 region on the second chimeric polypeptide comprising the pro-apoptotic polypeptide region in an amount effective to kill at least 90% of the modified cells that express the second chimeric polypeptide.
[1157] D6.1. A method of administering a ligand to a human subject who has undergone cell therapy using modified cells comprising administering the ligand to the human subject, wherein the modified cells comprise a nucleic acid of any one of embodiments B1-B76, wherein the ligand binds to a FKBP12 region.
[1158] D7. A method of controlling survival of transplanted modified cells in a subject, comprising:
[1159] a) transplanting modified cells of any one of embodiments A1-A71 or C1-C14 into the subject; and
[1160] b) after (a), administering to the subject a ligand that binds to the FKBP12 region on the second chimeric polypeptide comprising the pro-apoptotic polypeptide region in an amount effective to kill at least 90% of the modified cells that express the second chimeric polypeptide.
[1161] D8. The method of any one of embodiments D1-D7, wherein more than one dose of the ligand, rapamycin, or the rapalog is administered.
[1162] D9. The method of any one of embodiments D1-D8, further comprising
   [1163] identifying a presence or absence of a condition in the subject that requires the removal of transfected or transduced modified cells from the subject; and
   [1164] administering a rapamycin or a rapalog, or a ligand that binds to the FKBP12 region, maintaining a subsequent dosage, or adjusting a subsequent dosage to the subject based on the presence or absence of the condition identified in the subject.
[1165] D10. The method of any one of embodiments D1-D9 further comprising
[1166] identifying a presence or absence of a condition in the subject that requires the removal of transfected or transduced therapeutic cells from the subject; and
   [1167] determining whether a ligand that binds to the FKBP12 region, or rapamycin or a rapalog should be administered to the subject, or the dosage of the ligand subsequently administered to the subject is adjusted based on the presence or absence of the condition identified in the subject.
[1168] D11. The method of any one of embodiments D1-D9, further comprising
[1169] receiving information comprising presence or absence of a condition in the subject that requires the removal of transfected or transduced modified cells from the subject; and
[1170] administering rapamycin or a rapalog, or a ligand that binds to the FKBP12 region, maintaining a subsequent dosage, or adjusting a subsequent dosage to the subject based on the presence or absence of the condition identified in the subject.
[1171] D12. The method of any one of embodiments D1-D9, further comprising
[1172] identifying a presence or absence of a condition in the subject that requires the removal of transfected or transduced modified cells from the subject; and
[1173] transmitting the presence, absence or stage of the condition identified in the subject to a decision maker who administers rapamycin, a rapalog, or a ligand that binds to the FKBP12 region, maintains a subsequent dosage, or adjusts a subsequent dosage administered to the subject based on the presence, absence or stage of the condition identified in the subject.
[1174] D13. The method of any one of embodiments D1-D9, further comprising
[1175] identifying a presence or absence of a condition in the subject that requires the removal of transfected or transduced modified cells from the subject; and
[1176] transmitting an indication to administer rapamycin, a rapalog, or a ligand that binds to the FKBP12 region, maintains a subsequent dosage, or adjusts a subsequent dosage administered to the subject based on the presence, absence or stage of the condition identified in the subject.
[1177] D14. The method of embodiment D13, wherein after administration of the ligand, the number of modified cells causing graft versus host disease or cytokine release syndrome in the subject cells is reduced.
[1178] D15. The method of any one of embodiments D1-D14, wherein the modified cells are allodepleted before transfection or transduction.
[1179] D16. The method of any one of embodiments D1-D14, wherein the modified cells are not allodepleted before transfection or transduction.
[1180] D17. The method of any one of embodiments D1-D16, wherein the modified cells allogeneic to the subject.
[1181] D18. The method of any one of embodiments D1-D16, wherein the modified cells are autologous to the subject.
[1182] D19. The method of any one of embodiments D1-18, wherein the transduced or transfected modified cells are cultured in the presence of IL-2 before administration to the subject.
[1183] D20. The method of embodiment D19, wherein alloreactive modified cells are present in the subject and the number of alloreactive modified cells is reduced by at least 90% after administration of rapamycin, the rapalog, or the ligand.
[1184] D21. The method of any one of embodiments D7-D20, wherein, after administration of rapamycin, the rapalog, or the ligand, modified cells survive in the subject that are able to expand and are reactive to viruses and fungi.
[1185] D22. The method of any one of embodiments D7-D20, wherein after administration of rapamycin, the rapalog, or the ligand, modified cells survive in the subject that are able to expand and are reactive to tumor cells in the subject.
[1186] D23. The method of any one of embodiments D7-D20, wherein the subject has received a stem cell transplant before or at the same time as administration of the modified cells.
[1187] D24. The method of any one of embodiments D7-D20, further comprising determining whether to administer an additional dose or additional doses of rapamycin, the rapalog, or the ligand to the subject based upon the appearance of graft versus host disease symptoms in the subject.
[1188] D25. The method of any one of embodiments D1-D24, wherein at least 1×10⁶ transduced or transfected modified cells are administered to the subject.
[1189] D26. The method of any one of embodiments D1-D24, wherein at least 1×10⁷ transduced or transfected modified cells are administered to the subject.
[1190] D27. The method of any one of embodiments D1-D24, wherein at least 1×10⁸ transduced or transfected modified cells are administered to the subject.
[1191] D28. The method of any one of embodiments D1-D25, further comprising
   [1192] identifying the presence, absence or stage of graft versus host disease in the subject, and
   [1193] administering rapamycin, a rapalog, or a ligand that binds to the FKBP12 region, maintaining a subsequent dosage, or adjusting a subsequent dosage to the subject based on the presence, absence or stage of the graft versus host disease identified in the subject.
[1194] E1. A method of controlling activity of transplanted modified cells in a subject, comprising:
[1195] a) transplanting modified cells of any one of embodiments A1-71 or C1-C14 into the subject; wherein the first ligand binding region is a FKBP12 region, and the first chimeric polypeptide comprises
   [1196] (i) a MyD88 polypeptide or a truncated MyD88 polypeptide lacking a TIR domain;
   [1197] (ii) a CD40 cytoplasmic polypeptide region lacking a CD40 extracellular domain; or
   [1198] (iii) a MyD88 polypeptide or a truncated polypeptide lacking a TIR domain and a CD40 cytoplasmic polypeptide region lacking a CD40 extracellular domain; and
[1199] b) after (a), administering to the subject a ligand that binds to the FKBP12 region on the first chimeric polypeptide in an amount effective to stimulate a cell mediated immune response.
[1200] E1.1. A method of administering a ligand to a human subject who has undergone cell therapy using modified cells comprising administering the ligand to the human subject, wherein the modified cells comprise a nucleic acid of any one of embodiments B1-B88, wherein the ligand binds to a FKBP12 region.
[1201] E1.2. A method of administering rapamycin or a rapalog to a human subject who has undergone cell therapy using modified cells comprising administering rapamycin or a rapalog to the human subject, wherein the modified cells comprise a nucleic acid of any one of embodiments B1-B88, wherein the rapamycin or rapalog binds to a FRB region.
[1202] E2. A method of controlling activity of transplanted modified cells in a subject, comprising:
[1203] a) transplanting modified cells of any one of embodiments A1-A71 or C1-C14 into the subject; wherein the first ligand binding region is a FKBP12 region, and the first chimeric polypeptide comprises (i) a transmembrane region, (ii) a MyD88 polypeptide or a truncated MyD88 polypeptide lacking a TIR domain, (iii) a CD40 cytoplasmic polypeptide region lacking a CD40 extracellular domain and (iv) a T cell activation molecule, (v) an antigen recognition moiety; and
[1204] b) after (a), administering to the subject a ligand that binds to the FKBP12 region on the first chimeric polypeptide in an amount effective to stimulate a cell mediated immune response.
[1205] E3. The method of any one of embodiments E1-E2, wherein the second chimeric polypeptide comprising the pro-apoptotic polypeptide comprises a FRB region, comprising, after (b), administering to the subject rapamycin or a rapalog in an amount effective to kill less than 30% of the modified cells that express the second chimeric polypeptide.
[1206] E4. The method of any one of embodiments E1-E2, wherein the second chimeric polypeptide comprising the pro-apoptotic polypeptide comprises a FRB region, comprising, after (b), administering to the subject rapamycin or a rapalog in an amount effective to kill less than 40% of the modified cells that express the second chimeric polypeptide.
[1207] E5. The method of any one of embodiments E1-E2, wherein the second chimeric polypeptide comprising the pro-apoptotic polypeptide comprises a FRB region, comprising, after (b), administering to the subject rapamycin or a rapalog in an amount effective to kill less than 50% of the modified cells that express the second chimeric polypeptide.
[1208] E6. The method of any one of embodiments E1-E2, wherein the second chimeric polypeptide comprising the pro-apoptotic polypeptide comprises a FRB region, comprising, after (b), administering to the subject rapamycin or a rapalog in an amount effective to kill less than 60% of the modified cells that express the second chimeric polypeptide.
[1209] E7. The method of any one of embodiments E1-E2, wherein the second chimeric polypeptide comprising the pro-apoptotic polypeptide comprises a FRB region, comprising, after (b), administering to the subject rapamycin or a rapalog in an amount effective to kill less than 70% of the modified cells that express the second chimeric polypeptide.
[1210] E8. The method of any one of embodiments E1-E2, wherein the second chimeric polypeptide comprising the pro-apoptotic polypeptide comprises a FRB region, comprising, after (b), administering to the subject rapamycin or a rapalog in an amount effective to kill less at least 90% of the modified cells that express the second chimeric polypeptide.
[1211] E9. The method of any one of embodiments E1-E8, wherein the ligand that binds to the FKBP12 region is selected from the group consisting of AP1903, AP20187, and AP1510.
[1212] F1. A method for treating a subject having a disease or condition associated with an elevated expression of a target antigen expressed by a target cell, comprising (a) administering to the subject an effective amount of a modified cell of any one of embodiments A1-A71, or C1-C14, and (b) after a), administering an effective amount of a ligand, rapamycin, or a rapalog.
[1213] F2. The method of embodiment F1, wherein the target antigen is a tumor antigen.
[1214] F3. A method for reducing the size of a tumor in a subject, comprising administering a modified cell of any one of embodiments A1-A71, or C1-C14 to the subject, wherein the antigen recognition moiety binds to an antigen on the tumor.
[1215] F4. The method of any one of embodiments F1-F3, wherein the subject has been diagnosed as having a tumor.
[1216] F5. The method of any one of embodiments F1-F4, wherein the subject has cancer.
[1217] F6. The method of any one of embodiments F1-F5, wherein the subject has a solid tumor.
[1218] F7. The method of any one of embodiments F1-F6, wherein the modified cell is delivered to a tumor bed.
[1219] F8. The method of embodiment F5, wherein the cancer is present in the blood or bone marrow of the subject.
[1220] F9. The method of any one of embodiments F1-F3, wherein the subject has a blood or bone marrow disease.
[1221] F10. The method of any one of embodiments F1-F2, wherein the subject has been diagnosed with sickle cell anemia or metachromatic leukodystrophy.
[1222] F11. The method of any one of embodiments F1-F2, wherein the patient has been diagnosed with a condition selected from the group consisting of a primary immune deficiency condition, hemophagocytosis lymphohistiocytosis (HLH) or other hemophagocytic condition, an inherited marrow failure condition, a hemoglobinopathy, a metabolic condition, and an osteoclast condition.
[1223] F12. The method of any one of embodiments F1-F2, wherein the disease or condition is selected from the group consisting of Severe Combined Immune Deficiency (SCID), Combined Immune Deficiency (CID), Congenital T-cell Defect/Deficiency, Common Variable Immune Deficiency (CVID), Chronic Granulomatous Disease, IPEX (Immune deficiency, polyendocrinopathy, enteropathy, X-linked) or IPEX-like, Wiskott-Aldrich Syndrome, CD40 Ligand Deficiency, Leukocyte Adhesion Deficiency, DOCA 8 Deficiency, IL-10 Deficiency/IL-10 Receptor Deficiency, GATA 2 deficiency, X-linked lymphoproliferative disease (XLP), Cartilage Hair Hypoplasia, Shwachman Diamond Syndrome, Diamond Blackfan Anemia, Dyskeratosis Congenita, Fanconi Anemia, Congenital Neutropenia, Sickle Cell Disease, Thalassemia, Mucopolysaccharidosis, Sphingolipidoses, and Osteopetrosis.
[1224] F13. The method of any one of embodiments F1-F12, wherein the target cell is a tumor cell.
[1225] F14. The method of any one of embodiments F1-F13, wherein the number or concentration of target cells in the subject is reduced following administration of the modified cell.
[1226] F15. The method of any one of embodiments F1-F14, comprising measuring the number or concentration of target cells in a first sample obtained from the subject before administering the modified cell, measuring the number concentration of target cells in a second sample obtained from the subject after administration of the ligand, rapamycin, or rapalog cell, and determining an increase or decrease of the number or concentration of target cells in the second sample compared to the number or concentration of target cells in the first sample.
[1227] F16. The method of embodiment F15, wherein the concentration of target cells in the second sample is decreased compared to the concentration of target cells in the first sample.
[1228] F17. The method of embodiment F15, wherein the concentration of target cells in the second sample is increased compared to the concentration target cells in the first sample.
[1229] G1. A method for expressing a chimeric antigen receptor in a cell, comprising contacting a nucleic acid of any one of embodiments A1 to A71 with a cell under conditions in which the nucleic acid is incorporated into the cell, whereby the cell expresses the chimeric antigen receptor and the chimeric caspase polypeptide from the incorporated nucleic acid.
[1230] G2. The method of embodiment G1, wherein the nucleic acid is contacted with the cell ex vivo.
[1231] G3. The method of embodiment G1, wherein the nucleic acid is contacted with the cell in vivo.

### Example 27

### Additional Representative Embodiments

[1232] Provided hereafter are examples of certain embodiments of the technology.
[1233] 1 A nucleic acid comprising a promoter, operably linked to
   [1234] a) a first polynucleotide encoding a first chimeric polypeptide, wherein the first chimeric polypeptide comprises (i) a first multimerizing region or a second multimerizing region; (ii) a MyD88 polypeptide region or a truncated MyD88 polypeptide region lacking the TIR domain; and (iii) a CD40 cytoplasmic polypeptide region lacking the CD40 extracellular domain; and
   [1235] b) a second polynucleotide encoding a second chimeric polypeptide, wherein the second chimeric polypeptide comprises (i) a pro-apoptotic polypeptide region and (ii) the first multimerizing region or the second multimerizing region, wherein:
   [1236] the second multimerizing region has a different amino acid sequence than the first multimerizing region;
   [1237] the first chimeric polypeptide comprises the first multimerizing region and the second chimeric polypeptide comprises the second multimerizing region, or the first chimeric polypeptide comprises the second multimerizing region and the second chimeric polypeptide comprises the first multimerizing region;
   [1238] the first multimerizing region and the second multimerizing region bind to a first ligand;
   [1239] the first multimerizing region binds to a second ligand; and
   [1240] the second ligand does not significantly bind to the second multimerizing region.
[1241] 2. A nucleic acid comprising a promoter, operably linked to
   [1242] a) a first polynucleotide encoding a first chimeric polypeptide, wherein the first chimeric polypeptide comprises (i) a first multimerizing region or a second multimerizing region; and (ii) a MyD88 polypeptide region or a truncated MyD88 polypeptide region lacking the TIR domain; and
   [1243] b) a second polynucleotide encoding a second chimeric polypeptide, wherein the second chimeric polypeptide comprises (i) a pro-apoptotic polypeptide region and (ii) the first multimerizing region or the second multimerizing region, wherein
   [1244] the second multimerizing region has a different amino acid sequence than the first multimerizing region;
   [1245] the first chimeric polypeptide comprises the first multimerizing region and the second chimeric polypeptide comprises the second multimerizing region, or the first chimeric polypeptide comprises the second multimerizing region and the second chimeric polypeptide comprises the first multimerizing region;
   [1246] the first multimerizing region and the second multimerizing region bind to a first ligand;
   [1247] the first multimerizing region binds to a second ligand; and
   [1248] the second ligand does not significantly bind to the second multimerizing region.
[1249] 3. The nucleic acid of embodiments 1 or 2, wherein:
   [1250] the first ligand comprises a first portion,
   [1251] the first multimerizing region binds to the first portion, and
   [1252] the second multimerizing region does not significantly bind to the first portion.
[1253] 4. The nucleic acid of any one of embodiments 1 or 2, wherein:
   [1254] the first ligand comprises a first monomer,
   [1255] the first multimerizing region binds to the first monomer, and
   [1256] the second multimerizing region does not significantly bind to the first monomer.
[1257] 5. The nucleic acid of any one of embodiments 1-4, wherein the second ligand is not capable of binding to the second multimerizing region.
[1258] 6. The nucleic acid of any one of embodiments 1-4, wherein the nucleic acid further comprises a polynucleotide encoding a linker polypeptide between the first and second polynucleotides, wherein the linker polypeptide separates the translation products of the first and second polynucleotides during or after translation.
[1259] 7 The nucleic acid of embodiment 6, wherein the linker polypeptide is a 2A polypeptide.
[1260] 8. The nucleic acid of any one of embodiments 1-7, wherein the promoter is operably linked to the first polynucleotide and the second polynucleotide.
[1261] 9. The nucleic acid of any one of embodiments 1-8, wherein the promoter is developmentally regulated.
[1262] 10. The nucleic acid of any one of embodiments 1-8, wherein the promoter is tissue-specific.
[1263] 11. The nucleic acid of any one of embodiments 1-8, wherein the promoter is activated in activated T cells.
[1264] 12. The nucleic acid of any one of embodiments 1-11, wherein the first multimerizing region is a FKBP12 or FKBP12 variant region and the second multimerizing region is a FKBP-12-Rapamycin Binding (FRB) or FRB variant region.
[1265] 13. The nucleic acid of any one of embodiments 1-12, wherein the first ligand is rapamycin or a rapalog, and the second ligand is selected from the group consisting of AP1903, AP20187, and AP1510.
[1266] 14. A nucleic acid comprising a promoter, operably linked to
   [1267] a) a first polynucleotide encoding a first chimeric polypeptide, wherein the first chimeric polypeptide comprises (i) a FKBP12 or FKBP12 variant region; (ii) a MyD88 polypeptide region or a truncated MyD88 polypeptide region lacking the TIR domain; and (iii) a CD40 cytoplasmic polypeptide region lacking the CD40 extracellular domain; and
   [1268] b) a second polynucleotide encoding a second chimeric polypeptide, wherein the second chimeric polypeptide comprises a Caspase-9 region and a FRB or FRB variant region.
[1269] 15 A nucleic acid comprising a promoter, operably linked to
   [1270] a) a first polynucleotide encoding a first chimeric polypeptide, wherein the first chimeric polypeptide comprises (i) at least two FKBP12 or FKBP12 variant regions; (ii) a MyD88 polypeptide region or a truncated MyD88 polypeptide region lacking the TIR domain; and (iii) a CD40 cytoplasmic polypeptide region lacking the CD40 extracellular domain; and
   [1271] b) a second polynucleotide encoding a second chimeric polypeptide, wherein the second chimeric polypeptide comprises a Caspase-9 region and a FRB or FRB variant region.
[1272] 16. A modified cell, transfected or transduced with a nucleic acid of any one of embodiments 1-15.
[1273] 17. A modified cell, comprising
   [1274] a) a first polynucleotide encoding a first chimeric polypeptide, wherein the first chimeric polypeptide comprises (i) a first multimerizing region or a second multimerizing region; (ii) a MyD88 polypeptide region or a truncated MyD88 polypeptide region lacking the TIR domain; and (iii) a CD40 cytoplasmic polypeptide region lacking the CD40 extracellular domain; and
   [1275] b) a second polynucleotide encoding a second chimeric polypeptide, wherein the second chimeric polypeptide comprises (i) a pro-apoptotic polypeptide region and (ii) the first multimerizing region or the second multimerizing region, wherein:
   [1276] the second multimerizing region has a different amino acid sequence than the first multimerizing region;
   [1277] the first chimeric polypeptide comprises the first multimerizing region and the second chimeric polypeptide comprises the second multimerizing region, or the first chimeric polypeptide comprises the second multimerizing region and the second chimeric polypeptide comprises the first multimerizing region;
   [1278] the first multimerizing region and the second multimerizing region bind to a first ligand;
   [1279] the first multimerizing region binds to a second ligand; and
   [1280] the second ligand does not significantly bind to the second multimerizing region.
[1281] 18. A modified cell comprising
   [1282] a) a first polynucleotide encoding a first chimeric polypeptide, wherein the first chimeric polypeptide comprises (i) a first multimerizing region or a second multimerizing region; and (ii) a MyD88 polypeptide region or a truncated MyD88 polypeptide region lacking the TIR domain; and
   [1283] b) a second polynucleotide encoding a second chimeric polypeptide, wherein the second chimeric polypeptide comprises (i) a pro-apoptotic polypeptide region and (ii) the first multimerizing region or the second multimerizing region, wherein
   [1284] the second multimerizing region has a different amino acid sequence than the first multimerizing region;
   [1285] the first chimeric polypeptide comprises the first multimerizing region and the second chimeric polypeptide comprises the second multimerizing region, or the first chimeric polypeptide comprises the second multimerizing region and the second chimeric polypeptide comprises the first multimerizing region;
   [1286] the first multimerizing region and the second multimerizing region bind to a first ligand;
   [1287] the first multimerizing region binds to a second ligand; and
   [1288] the second ligand does not significantly bind to the second multimerizing region.
[1289] 19. The modified cell of embodiment 17 or embodiment 18, wherein:
   [1290] the first ligand comprises a first portion,
   [1291] the first multimerizing region binds to the first portion, and
   [1292] the second multimerizing region does not significantly bind to the first portion.
[1293] 20. The modified cell of any one of embodiments 17-19, wherein the second ligand is not capable of binding to the second multimerizing region.
[1294] 21. The modified cell of any one of embodiments 17-19, wherein the first multimerizing region is a FKBP12 or FKBP12 variant region and the second multimerizing region is a FRB or FRB variant region.
[1295] 22. The modified cell of any one of embodiments 17-21, wherein the first ligand is rapamycin or a rapalog, and the second ligand is selected from the group consisting of AP1903, AP20187, and AP1510.
[1296] 23. A modified cell, comprising
   [1297] a) a first polynucleotide encoding a first chimeric polypeptide, wherein the first chimeric polypeptide comprises (i) a FKBP12 or FKBP12 variant region; (ii) a MyD88 polypeptide region or a truncated MyD88 polypeptide region lacking the TIR domain; and (iii) a CD40 cytoplasmic polypeptide region lacking the CD40 extracellular domain; and
   [1298] b) a second polynucleotide encoding a second chimeric polypeptide, wherein the second chimeric polypeptide comprises a Caspase-9 region and a FRB or FRB variant region.
[1299] 24. A modified cell, comprising
   [1300] a) a first polynucleotide encoding a first chimeric polypeptide, wherein the first chimeric polypeptide comprises (i) at least two FKBP12 or FKBP12 variant regions; (ii) a MyD88 polypeptide region or a truncated MyD88 polypeptide region lacking the TIR domain; and (iii) a CD40 cytoplasmic polypeptide region lacking the CD40 extracellular domain; and
   [1301] b) a second polynucleotide encoding a second chimeric polypeptide, wherein the second chimeric polypeptide comprises a Caspase-9 region and a FRB or FRB variant region.
[1302] 25. A modified cell, comprising
   [1303] a) a first chimeric polypeptide, wherein the first chimeric polypeptide comprises (i) a first multimerizing region or a second multimerizing region; (ii) a MyD88 polypeptide region or a truncated MyD88 polypeptide region lacking the TIR domain; and (iii) a CD40 cytoplasmic polypeptide region lacking the CD40 extracellular domain; and
   [1304] b) a second chimeric polypeptide, wherein the second chimeric polypeptide comprises (i) a pro-apoptotic polypeptide region and (ii) the first multimerizing region or the second multimerizing region, wherein:

[1305] the second multimerizing region has a different amino acid sequence than the first multimerizing region;

[1306] the first chimeric polypeptide comprises the first multimerizing region and the second chimeric polypeptide comprises the second multimerizing region, or the first chimeric polypeptide comprises the second multimerizing region and the second chimeric polypeptide comprises the first multimerizing region;
[1307] the first multimerizing region and the second multimerizing region bind to a first ligand;
[1308] the first multimerizing region binds to a second ligand; and
   the second ligand does not significantly bind to the second multimerizing region.
[1309] 26. The modified cell of embodiment 25, comprising a first polynucleotide that encodes the first chimeric polypeptide and a second polynucleotide that encodes the second polypeptide.
[1310] 27. The modified cell of any one of embodiments 16-26, wherein the cell further comprises a chimeric antigen receptor.
[1311] 28. The modified cell of any one of embodiments 16-26, wherein the cell further comprises a T cell receptor.
[1312] 29. The modified cell of any one of embodiments 16-28, wherein the cell is a T cell, tumor infiltrating lymphocyte, NK-T cell, or NK cell.
[1313] 30. The modified cell of any one of embodiments 16-28, wherein the cell is a T cell.
[1314] 31. The modified cell of any one of embodiments 16-28, wherein the cell is a primary T cell.
[1315] 32. The modified cell of any one of embodiments 16-28, wherein the cell is a cytotoxic T cell.
[1316] 33. The modified cell of any one of embodiments 16-28, wherein the cell is selected from the group consisting of embryonic stem cell (ESC), induced pluripotent stem cell (iPSC), non-lymphocytic hematopoietic cell, non-hematopoietic cell, macrophage, keratinocyte, fibroblast, melanoma cell, tumor infiltrating lymphocyte, natural killer cell, natural killer T cell, or T cell.
[1317] 34. The modified cell of any one of embodiments 16-28, wherein the T cell is a helper T cell.
[1318] 35. The modified cell of any one of embodiments 16-34, wherein the cell is obtained or prepared from bone marrow.
[1319] 36. The modified cell of any one of embodiments 16-34, wherein the cell is obtained or prepared from umbilical cord blood.
[1320] 37. The modified cell of any one of embodiments 16-34, wherein the cell is obtained or prepared from peripheral blood.
[1321] 38. The modified cell of any one of embodiments 16-34, wherein the cell is obtained or prepared from peripheral blood mononuclear cells.
[1322] 39. The modified cell of any one of embodiments 16-38, wherein the cell is a human cell.
[1323] 40. The modified cell of any one of embodiments 16-39, wherein the modified cell is transduced or transfected in vivo.
[1324] 41. The modified cell of any one of embodiments 16-40, wherein the cell is transfected or transduced by the nucleic acid vector using a method selected from the group consisting of electroporation, sonoporation, biolistics (e.g., Gene Gun with Au-particles), lipid transfection, polymer transfection, nanoparticles, or polyplexes.
[1325] 42. The modified cell of any one of embodiments 16-41, comprising the first ligand or the second ligand.
[1326] 43. A kit or composition comprising nucleic acid comprising a first polynucleotide and a second polynucleotide, wherein
   [1327] a) the first polynucleotide encodes a first chimeric polypeptide, wherein the first chimeric polypeptide comprises (i) a first multimerizing region or a second multimerizing region; (ii) a MyD88 polypeptide region or a truncated MyD88 polypeptide region lacking the TIR domain; and (iii) a CD40 cytoplasmic polypeptide region lacking the CD40 extracellular domain; and
   [1328] b) the second polynucleotide encodes a second chimeric polypeptide, wherein the second chimeric polypeptide comprises (i) a pro-apoptotic polypeptide region and (ii) the first multimerizing region or the second multimerizing region, wherein:
   [1329] the second multimerizing region has a different amino acid sequence than the first multimerizing region;
   [1330] the first chimeric polypeptide comprises the first multimerizing region and the second chimeric polypeptide comprises the second multimerizing region, or the first chimeric polypeptide comprises the second multimerizing region and the second chimeric polypeptide comprises the first multimerizing region;
   [1331] the first multimerizing region and the second multimerizing region bind to a first ligand;
   [1332] the first multimerizing region binds to a second ligand; and
      the second ligand does not significantly bind to the second multimerizing region.
[1333] 44. The kit or composition of embodiment 43, wherein the second multimerizing region binds to the first multimeric ligand and binds to a second multimeric ligand that does not significantly bind to the first multimerizing region.
[1334] 45. The kit or composition of any one of embodiments 43 or 44, wherein:
   [1335] the first ligand comprises a first portion,
   [1336] the first multimerizing region binds to the first portion, and
   [1337] the second multimerizing region does not significantly bind to the first portion.
[1338] 46. The kit or composition of any one of embodiments 43 or 44, wherein:
   [1339] the first ligand comprises a first monomer,
   [1340] the first multimerizing region binds to the first monomer, and
   [1341] the second multimerizing region does not significantly bind to the first monomer.
[1342] 47. The kit or composition of any one of embodiments 43-46, wherein the first multimerizing region is not capable of binding to the second multimeric ligand.
[1343] 48. The kit or composition of any one of embodiments 43-47, wherein the first and second multimerizing regions bind to rapamycin or a rapalog.
[1344] 49. The kit or composition of any one of embodiments 43-48, where the nucleic acid comprises the first polynucleotide and the second polynucleotide.
[1345] 50. The kit or composition of any one of embodiments 43-49, comprising a first nucleic acid species comprising the first polynucleotide and a second nucleic acid species comprising the second polynucleotide.

[1346] 51. A method of controlling survival of transplanted modified cells in a subject, comprising
[1347] a) transplanting modified cells of any one of embodiments 16-41 into the subject, and
[1348] b) after (a), administering to the subject the first ligand in an amount effective to kill less than 30% of the modified cells that express the second chimeric polypeptide.
[1349] 52. A method of stimulating an immune response in a subject, comprising:
   [1350] a) transplanting modified cells of any one of embodiments 16-41 into the subject, and
   [1351] b) after (a), administering an effective amount of the second ligand to stimulate a cell mediated immune response.
[1352] 53. A method of administering a ligand to a human subject who has undergone cell therapy using modified cells, comprising administering the second ligand to the human subject, wherein the modified cells comprise modified cells of any one of embodiments 16-41.
[1353] 54. A method of administering rapamycin or a rapalog to a human subject who has undergone cell therapy using modified cells, comprising administering rapamycin or a rapalog to the human subject, wherein the modified cells comprise a modified cell of any one of embodiments 16-41.
[1354] 55. A method of controlling activity of transplanted modified cells in a subject, comprising:
   [1355] a) transplanting a modified cell of any one of embodiments 14-36; and
   [1356] b) after (a), administering an effective amount of the second ligand to stimulate the activity of the transplanted modified cells.
[1357] 56. A method for treating a subject having a disease or condition associated with an elevated expression of a target antigen expressed by a target cell, comprising
   [1358] (a) transplanting an effective amount of modified cells into the subject; wherein the modified cells comprise a modified cell of any one of embodiments 16-41, wherein the modified cell comprises a chimeric antigen receptor comprising an antigen recognition moiety that binds to the target antigen, and
   [1359] (b) after a), administering an effective amount of the second ligand to reduce the number or concentration of target antigen or target cells in the subject.
[1360] 57. The method of embodiment 56, wherein the target antigen is a tumor antigen.
[1361] 58. A method for treating a subject having a disease or condition associated with an elevated expression of a target antigen expressed by a target cell, comprising
   [1362] (a) administering to the subject an effective amount of modified cells, wherein the modified cells comprise
      [1363] (i) a modified cell of any one of embodiments 16-41, wherein the modified cell comprises a chimeric T cell receptor that recognizes and binds to the target antigen, and
   [1364] (b) after a), administering an effective amount of the second ligand to reduce the number or concentration of target antigen or target cells in the subject.
[1365] 59. A method for reducing the size of a tumor in a subject, comprising
[1366] a) administering a modified cell of any one of embodiments 16-41 to the subject, wherein the cell comprises a chimeric antigen receptor comprising an antigen recognition moiety that binds to an antigen on the tumor; and
[1367] b) after a), administering an effective amount of the second ligand to reduce the size of the tumor in the subject.
[1368] 60. The method of any one of embodiments 56-59, comprising measuring the number or concentration of target cells in a first sample obtained from the subject before administering second ligand, measuring the number or concentration of target cells in a second sample obtained from the subject after administering the second ligand, and determining an increase or decrease of the number or concentration of target cells in the second sample compared to the number or concentration of target cells in the first sample.
[1369] 61. The method of embodiment 60, wherein the concentration of target cells in the second sample is decreased compared to the concentration of target cells in the first sample.
[1370] 62. The method of embodiment 60, wherein the concentration of target cells in the second sample is increased compared to the concentration of target cells in the first sample.
[1371] 63. The method of any one of embodiments 51-62, wherein the subject has received a stem cell transplant before or at the same time as administration of the modified cells.
[1372] 64. The method of any one of embodiments 51-63, wherein at least 1×10⁶ transduced or transfected modified cells are administered to the subject.
[1373] 65. The method of any one of embodiments 51-63, wherein at least 1×10⁷ transduced or transfected modified cells are administered to the subject.
[1374] 66. The method of any one of embodiments 51-63, wherein at least 1×10⁸ modified cells are administered to the subject.
[1375] 67. The method of any one of embodiments 52-66, further comprising after (b), administering to the subject the first ligand in an amount effective to kill less than 30% of the modified cells that express the second chimeric polypeptide.
[1376] 68. The method of any one of embodiments 51 or 67, wherein the first ligand is administered in an amount effective to kill less than 40% of the modified cells that express the second chimeric polypeptide.
[1377] 69. The method of any one of embodiments 51 or 67, wherein the first ligand is administered in an amount effective to kill less than 50% of the modified cells that express the second chimeric polypeptide.
[1378] 70. The method of any one of embodiments 51 or 67, wherein the first ligand is administered in an amount effective to kill less than 60% of the modified cells that express the second chimeric polypeptide.
[1379] 71. The method of any one of embodiments 51 or 67, wherein the first ligand is administered in an amount effective to kill less than 70% of the modified cells that express the second chimeric polypeptide.
[1380] 72. The method of any one of embodiments 51 or 67, wherein the first ligand is administered in an amount effective to kill less than 90% of the modified cells that express the second chimeric polypeptide.
[1381] 73. The method of any one of embodiments 51 or 67, wherein the first ligand is administered in an amount effective to kill at least 90% of the modified cells that express the second chimeric polypeptide.
[1382] 74. The method of any one of embodiments 51 or 67, wherein the first ligand is administered in an amount effective to kill at least 95% of the modified cells that express the second chimeric polypeptide.
[1383] 75. The method of any one of embodiments 51 or 67-74, wherein more than one dose of the first ligand is administered to the subject.
[1384] 76. The method of any one of embodiments 52-75, wherein more than one dose of the second ligand is administered to the subject.
[1385] 77. The method of any one of embodiments 51 or 67-95, further comprising identifying a presence or absence of a condition in the subject that requires the removal of the modified cells from the subject; and administering the first ligand, maintaining a subsequent dosage of the first ligand, or adjusting a subsequent dosage of the first ligand to the subject based on the presence or absence of the condition identified in the subject.
[1386] 78. The method of any one of embodiments 51 or 67-75, further comprising
[1387] receiving information comprising presence or absence of a condition in the subject that requires the removal of the modified cells from the subject; and
[1388] administering the first ligand, maintaining a subsequent dosage of the first ligand, or adjusting a subsequent dosage of the first ligand to the subject based on the presence or absence of the condition identified in the subject.
[1389] 79. The method of any one of embodiments 51 or 67-75, further comprising
[1390] identifying a presence or absence of a condition in the subject that requires the removal of the modified cells from the subject; and
[1391] transmitting the presence, absence or stage of the condition identified in the subject to a decision maker who administers the first ligand, maintains a subsequent dosage of the first ligand, or
[1392] adjusts a subsequent dosage of the first ligand administered to the subject based on the presence, absence or stage of the condition identified in the subject.
[1393] 80. The method of any one of embodiments 51 or 67-75, further comprising
[1394] identifying a presence or absence of a condition in the subject that requires the removal of the modified cells from the subject; and
[1395] transmitting an indication to administer the first ligand, maintain a subsequent dosage of the first ligand, or adjust a subsequent dosage of the first ligand administered to the subject based on the presence, absence or stage of the condition identified in the subject.
[1396] 81. The nucleic acid of any one of embodiments 1-15, wherein the nucleic acid further comprises a third polynucleotide encoding a marker polypeptide.
[1397] 82. The nucleic acid, cell, or method of any one of embodiments 1-81, wherein the first chimeric polypeptide further comprises a marker polypeptide.
[1398] 83. The nucleic acid, cell, or method of any one of embodiments 1-81, wherein the second chimeric polypeptide further comprises a marker polypeptide.
[1399] 84. The nucleic acid, cell, or method of embodiment 83, wherein the marker polypeptide is a ΔCD19 polypeptide.
[1400] 85. The nucleic acid, cell, or method of any one of embodiments 1-84, wherein the first chimeric polypeptide further comprises a membrane-targeting region.
[1401] 86. The nucleic acid, cell, or method of embodiment 85, wherein the membrane-targeting region is selected from the group consisting of a myristoylation region, palmitoylation region, prenylation region, NKG2D receptor, and transmembrane sequences of receptors.
[1402] 87. The nucleic acid, cell, or method of embodiment 85, wherein the membrane-targeting region is a myristoylation region.
[1403] 88. The nucleic acid, cell, or method of embodiment 87, wherein the myristoylation region has an amino acid sequence of SEQ ID NO: 3 or a functional fragment thereof.
[1404] 89. The nucleic acid, cell, or method of any one of embodiments 1-88, wherein the first multimerizing region is an FKBP12 variant region that has an amino acid substitution at position 36 selected from the group consisting of valine, leucine, isoleuceine and alanine.
[1405] 90. The nucleic acid, cell, or method of embodiment 89, wherein the first multimerizing region is an FKBP12v36 region.
[1406] 91. The nucleic acid, cell, or method of any one of embodiments 1-90, wherein the first multimerizing region comprises two or more multimerizing regions.
[1407] 92. The nucleic acid, cell, or method of any one of embodiments 1-90, wherein the first multimerizing region comprises three or more multimerizing regions.
[1408] 93. The nucleic acid, cell, or method of embodiment 91, wherein the two or more multimerizing regions are each an FKBP12 region, or an FKBP12 region that has an amino acid substitution at position 36 selected from the group consisting of valine, leucine, isoleuceine and alanine.
[1409] 94. The nucleic acid, cell, or method of any one of embodiments 1-93, wherein the second multimerizing region is selected from the group consisting of KLW (T2098L), KTF (W2101F), and KLF (T2098L, W2101F).
[1410] 95. The nucleic acid, cell, or method embodiment 94, wherein the FRB variant region is FRB_{L}
[1411] 96. The nucleic acid, cell, or method of any one of embodiments 1-95, wherein the first ligand is a rapalog that is selected from the group consisting of S-o,p-dimethoxyphenyl (DMOP)-rapamycin, R-Isopropoxyrapamycin, and S-Butanesulfonamidorap.
[1412] 97. The nucleic acid, cell, or method of any one of embodiments 1-96, wherein the pro-apoptotic polypeptide is selected from the group consisting of caspase 1, 2, 3, 4, 5, 6, 7, 8, 9, 10, 11, 12, 13, or 14, FADD (DED), APAF1 (CARD), CRADD/RAIDD CARD), ASC (CARD), Bax, Bak, Bcl-xL, Bcl-2, RIPK3, and RIPK1-RHIM.
[1413] 98. The nucleic acid, cell, or method of any one of embodiments 1-96, wherein the pro-apoptotic polypeptide is a caspase polypeptide.
[1414] 99. The nucleic acid, cell, or method of embodiment 98, wherein the pro-apoptotic polypeptide is a Caspase-9 polypeptide.
[1415] 100. The nucleic acid, cell, or method of any one of embodiments 98 or 99, wherein the caspase polypeptide comprises the amino acid sequence of SEQ ID NO: 300.
[1416] 101. The nucleic acid, cell, or method of embodiment 99, wherein the caspase polypeptide is a modified Caspase-9 polypeptide comprising an amino acid substitution selected from the group consisting of the catalytically active caspase variants in Tables 5 or 6.
[1417] 102. The nucleic acid, cell, or method of embodiment 99, wherein the caspase polypeptide is a modified Caspase-9 polypeptide comprising an amino acid sequence selected from the group consisting of D330A, D330E, and N405Q.
[1418] 103. The nucleic acid, cell, or method of any one of embodiments 1-102, wherein the truncated MyD88 polypeptide has the amino acid sequence of SEQ ID NO: 214, or a functional fragment thereof.
[1419] 104. The nucleic acid, cell, or method of any one of embodiments 1-102, wherein the MyD88 polypeptide has the amino acid sequence of SEQ ID NO: 282, or a functional fragment thereof.
[1420] 105. The nucleic acid, cell, or method of any one of embodiments 1, 3-17, 19-104, wherein the cytoplasmic CD40 polypeptide has the amino acid sequence of SEQ ID NO: 216, or a functional fragment thereof.
[1421] 106. The nucleic acid, cell, or method of any one of embodiments 1-105, wherein the first chimeric polypeptide further comprises a chimeric antigen receptor.
[1422] 107. The nucleic acid, cell, or method of any one of embodiments 1-105, wherein the nucleic acid further comprises a polynucleotide encoding a chimeric antigen receptor.
[1423] 108. The nucleic acid, cell, or method of any one of embodiments 1-105, wherein the first chimeric polypeptide further comprises a T cell receptor, or a T cell receptor-based chimeric antigen receptor.
[1424] 109. The nucleic acid, cell, or method of any one of embodiments 1-105, wherein the nucleic acid further comprises a polynucleotide encoding a T cell receptor or a T cell receptor-based chimeric antigen receptor.
[1425] 110. The nucleic acid, cell, or method of any one of embodiments 108 or 109, wherein the T cell receptor binds to an antigenic polypeptide selected from the group consisting of PRAME, Bob-1, and NY-ESO-1.
[1426] 111. The nucleic acid, cell, or method of any one of embodiments 106 or 107, wherein the chimeric antigen receptor comprises (i) a transmembrane region, (ii) a T cell activation molecule, and (iii) an antigen recognition moiety.
[1427] 112. The nucleic acid, cell, or method of embodiment 111, wherein the antigen recognition moiety binds to an antigen selected from the group consisting of an antigen on a tumor cell, an antigen on a cell involved in a hyperproliferative disease, a viral antigen, a bacterial antigen, CD19, PSCA, Her2/Neu, PSMA, Muc1, ROR1, Mesothelin, GD2, CD123, Muc16, CD33, CD38, and CD44v6.
[1428] 113. The nucleic acid, cell, or method of any one of embodiments 111-112, wherein the T cell activation molecule is selected from the group consisting of an ITAM-containing, Signal 1 conferring molecule, a CD3 ζ polypeptide, and an Fc epsilon receptor gamma (FcεR1γ) subunit polypeptide.
[1429] 114. The nucleic acid, cell, or method of any one of embodiments 111-113, wherein the antigen recognition moiety is a single chain variable fragment.
[1430] 115. The nucleic acid, cell, or method of any one of embodiments 111-114, wherein the transmembrane region is a CD8 transmembrane region.
[1431] 116. The nucleic acid of any one of embodiments 1-15 or 81-115, wherein the nucleic acid is contained within a viral vector.
[1432] 117. The nucleic acid of embodiment 116, wherein the viral vector is selected from the group consisting of retroviral vector, murine leukemia virus vector, SFG vector, adenoviral vector, lentiviral vector, adeno-associated virus (AAV), Herpes virus, and Vaccinia virus.
[1433] 118. The nucleic acid of any one of embodiments 1-15 or 81-117, wherein the nucleic acid is prepared or in a vector designed for electroporation, sonoporation, or biolistics, or is attached to or incorporated in chemical lipids, polymers, inorganic nanoparticles, or polyplexes.
[1434] 119. The nucleic acid of any one of embodiments 1-15 or 81-115, wherein the nucleic acid is contained within a plasmid.
[1435] 120. The nucleic acid or cell of any one of embodiments 1-41 or 81-119, comprising a polynucleotide coding for a polypeptide provided in the tables of Example 23.
[1436] 121. The nucleic acid or cell of any one of embodiments 1-41 or 81-119, comprising a polynucleotide coding for a polypeptide provided in the tables of Example 23 selected from group consisting of FKBPv36, FpK′, FpK, Fv, Fv′, FKBPpK′, FKBPpK″, and FKBPpK″′.
[1437] 122. The nucleic acid or cell of any one of embodiments 1-41 or 81-119, comprising a polynucleotide coding for a polypeptide provided in the tables of Example 23 selected from group consisting of FRP5-VL, FRP5-VH, FMC63-VL, and FMC63-VH.
[1438] 123. The nucleic acid or cell of embodiment 122, comprising a polynucleotide coding for FRP5-VL and FRP5-VH.
[1439] 124. The nucleic acid or cell of embodiment 122, comprising a polynucleotide coding for FMC63-VL and FMC63-VH.
[1440] 125. The nucleic acid or cell of embodiment 120, comprising a polynucleotide coding for a polypeptide provided in the tables of Example 23 selected from group consisting of MyD88L and MyD88.
[1441] 126. The nucleic acid or cell of embodiment 120, comprising a polynucleotide coding for a ΔCaspase-9 polypeptide provided in the tables of Example 23.
[1442] 127. The nucleic acid or cell of embodiment 120, comprising a polynucleotide coding for a ΔCD19 polypeptide provided in the tables of Example 23.
[1443] 128. The nucleic acid or cell of embodiment 120, comprising a polynucleotide coding for a hCD40 polypeptide provided in the tables of Example 23.
[1444] 129. The nucleic acid or cell of embodiment 120, comprising a polynucleotide coding for a CD3zeta polypeptide provided in the tables of Example 23.
[1445] 130. The method of any one of embodiments 81-115-102, wherein the subject has cancer.
[1446] 131. The method of any one of embodiments 81-115, or 130, or 117, wherein the modified cell is delivered to a tumor bed.
[1447] 132. The method of any one of embodiments 130 or 131, wherein the cancer is present in the blood or bone marrow of the subject.
[1448] 133. The method of embodiment 132, wherein the subject has a blood or bone marrow disease.
[1449] 134. The method of any one of embodiments 132-133, wherein the subject has been diagnosed with sickle cell anemia or metachromatic leukodystrophy.
[1450] 135. The method of any one of embodiments 132-133, wherein the patient has been diagnosed with a condition selected from the group consisting of a primary immune deficiency condition, hemophagocytosis lymphohistiocytosis (HLH) or other hemophagocytic condition, an inherited marrow failure condition, a hemoglobinopathy, a metabolic condition, and an osteoclast condition.
[1451] 136. The method of any one of embodiments 81-115, wherein the patient has been diagnosed with a disease or condition selected from the group consisting of Severe Combined Immune Deficiency (SCID), Combined Immune Deficiency (CID), Congenital T-cell Defect/Deficiency, Common Variable Immune Deficiency (CVID), Chronic Granulomatous Disease, IPEX (Immune deficiency, polyendocrinopathy, enteropathy, X-linked) or IPEX-like, Wiskott-Aldrich Syndrome, CD40 Ligand Deficiency, Leukocyte Adhesion Deficiency, DOCA 8 Deficiency, IL-10 Deficiency/IL-10 Receptor Deficiency, GATA 2 deficiency, X-linked lymphoproliferative disease (XLP), Cartilage Hair Hypoplasia, Shwachman Diamond Syndrome, Diamond Blackfan Anemia, Dyskeratosis Congenita, Fanconi Anemia, Congenital Neutropenia, Sickle Cell Disease, Thalassemia, Mucopolysaccharidosis, Sphingolipidoses, and Osteopetrosis.
[1452] 137. A nucleic acid comprising a promoter, operably linked to a first polynucleotide and a second polynucleotide, wherein
   [1453] a) the first polynucleotide encodes a first chimeric apoptotic polypeptide comprising a first multimerizing region and a pro-apoptotic polypeptide region; and
   [1454] b) the second polynucleotide encodes a second chimeric apoptotic polypeptide comprising a second multimerizing region and a pro-apoptotic polypeptide region, wherein the second multimerizing region has a different amino acid sequence than the first multimerizing region; wherein the first and second multimerizing regions bind to a first ligand and the pro-apoptotic polypeptide regions are together capable of multimerizing following binding to the first ligand and inducing apoptosis in a cell.
[1455] 138. The nucleic acid of embodiment 137, wherein the first multimerizing region binds to a second ligand that does not significantly bind to the second multimerizing region.
[1456] 139. The modified cell of embodiment 137 or embodiment 138, wherein:
   [1457] the first ligand comprises a first portion,
   [1458] the first multimerizing region binds to the first portion, and
   [1459] the second multimerizing region does not significantly bind to the first portion.
[1460] 140. The modified cell of embodiment 137 or embodiment 138, wherein:
   [1461] the first ligand comprises a first monomer,
   [1462] the first multimerizing region binds to the first monomer, and
   [1463] the second multimerizing region does not significantly bind to the first monomer.
[1464] 141. The nucleic acid of embodiment 138, wherein the second ligand is not capable of binding to the second multimerizing region.
[1465] 142. The nucleic acid of any one of embodiments 137-141, wherein the proapoptotic polypeptide is a caspase polypeptide.
[1466] 143. A nucleic acid comprising a promoter operably linked to a polynucleotide coding for a polypeptide comprising a FRB or FRB variant region and a caspase polypeptide region.
[1467] 144. A polypeptide encoded by the nucleic acid of embodiment 144.
[1468] 145. A nucleic acid comprising a promoter, operably linked to a first polynucleotide and a second polynucleotide, wherein
   [1469] a) the first polynucleotide encodes a first chimeric caspase polypeptide comprising a FRB or FRB variant region and a caspase polypeptide region; and
   [1470] b) the second polynucleotide encodes a second chimeric caspase polypeptide comprising an FKBP12 or FKBP12 variant region and a caspase polypeptide region.
[1471] 146. The nucleic acid of any one of embodiments 142-145, wherein the caspase polypeptides are Caspase-9 polypeptides.
[1472] 147. The nucleic acid of any one of embodiments 137-142 or 145-146, wherein the nucleic acid further comprises a polynucleotide encoding a linker polypeptide between the first and second polynucleotides, wherein the linker polypeptide separates the translation products of the first and second polynucleotides during or after translation.
[1473] 148. The nucleic acid of embodiment 147, wherein the linker polypeptide is a 2A polypeptide.
[1474] 149. The nucleic acid of any one of embodiments 137-142 or 145-147, wherein the promoter is operably linked to the first polynucleotide and the second polynucleotide.
[1475] 150. The nucleic acid of any one of embodiments 137-142 or 145-148, wherein the promoter is developmentally regulated.
[1476] 151. The nucleic acid of any one of embodiments 137-142 or 140-150, wherein the promoter is tissue-specific.
[1477] 152. The nucleic acid of any one of embodiments 137-142 or 145-151, wherein the promoter is activated in activated T cells.
[1478] 153. A modified cell, transfected or transduced with a nucleic acid of any one of embodiments 137-142 or 145-152.
[1479] 154. A modified cell, comprising
   [1480] a) a first polynucleotide encoding a first chimeric apoptotic polypeptide comprising a first multimerizing region and a pro-apoptotic polypeptide region and a second multimerizing region; and
   [1481] b) a second polynucleotide encoding a second chimeric apoptotic polypeptide comprising a second multimerizing region and a pro-apoptotic polypeptide region, wherein the second multimerizing region has a different amino acid sequence than the first multimerizing region; wherein the first and second multimerizing regions bind to a first ligand and the pro-apoptotic polypeptide regions are together capable of multimerizing following binding to the first ligand and inducing apoptosis in the cell.
[1482] 155. The modified cell of embodiment 154, wherein the first multimerizing region binds to a second ligand that does not significantly bind to the second multimerizing region.
[1483] 156. The modified cell of embodiment 154, wherein the second ligand is not capable of binding to the second multimerizing region.
[1484] 157. The modified cell of any one of embodiments 154-156, wherein the pro-apoptotic polypeptide is a caspase polypeptide.
[1485] 158. A modified cell comprising a polynucleotide coding for a polypeptide comprising a FRB or FRB variant region and a caspase polypeptide region.
[1486] 159. A modified cell, comprising
   [1487] a) a first chimeric apoptotic polypeptide comprising a first multimerizing region and a pro-apoptotic polypeptide region; and
   [1488] b) a second chimeric apoptotic polypeptide comprising a second multimerizing region and a pro-apoptotic polypeptide region, wherein the second multimerizing region has a different amino acid sequence than the first multimerizing region;
      wherein the first and second multimerizing regions bind to a first multimeric ligand and wherein the first and second multimerizing regions bind to a first ligand and the pro-apoptotic polypeptide regions are together capable of multimerizing following binding to the first ligand and inducing apoptosis in a cell.
[1489] 160. The modified cell of embodiment 159, comprising a first polynucleotide that encodes the first chimeric apoptotic polypeptide and a second polynucleotide that encodes the second apoptotic polypeptide.
[1490] 161. A modified cell comprising a promoter, operably linked to a first polynucleotide and a second polynucleotide, wherein
   [1491] a) the first polynucleotide encodes a first chimeric caspase polypeptide comprising a FRB or FRB variant region and a caspase polypeptide region; and
   [1492] b) the second polynucleotide encodes a second chimeric caspase polypeptide comprising an FKBP12 or FKBP12 variant region and a caspase polypeptide region.
[1493] 162. The modified cell acid of any one of embodiments 157-161, wherein the caspase polypeptide region is a Caspase-9 polypeptide.
[1494] 163. A kit or composition comprising nucleic acid comprising a first polynucleotide and a second polynucleotide, wherein
   [1495] a) the first polynucleotide encodes a first chimeric apoptotic polypeptide comprising a first multimerizing region and a pro-apoptotic polypeptide region; and
   [1496] b) the second polynucleotide encodes a second chimeric apoptotic polypeptide comprising a second multimerizing region and a pro-apoptotic polypeptide region, wherein the second multimerizing region has a different amino acid sequence than the first multimerizing region; wherein the first and second multimerizing regions bind to a first ligand and the pro-apoptotic polypeptide regions are together capable of multimerizing following binding to the first ligand and inducing apoptosis in a cell.
[1497] 164. The kit or composition of embodiment 163, wherein the second multimerizing region binds to the first multimeric ligand and binds to a second multimeric ligand that does not significantly bind to the first multimerizing region.
[1498] 165. The kit or composition of any one of embodiments 163 or 164, wherein:
   [1499] the first ligand comprises a first portion,
   [1500] the first multimerizing region binds to the first portion, and
   [1501] the second multimerizing region does not significantly bind to the first portion.
[1502] 166. The kit or composition of any one of embodiments 163-165, wherein:
   [1503] the first ligand comprises a first monomer,
   [1504] the first multimerizing region binds to the first monomer, and
   [1505] the second multimerizing region does not significantly bind to the first monomer.
[1506] 167. The kit or composition of any one of embodiments 163-166, wherein the first multimerizing region is not capable of binding to the second multimeric ligand.
[1507] 168. The kit or composition of any one of embodiments 163-167, wherein the first and second multimerizing regions bind to rapamycin or a rapalog.
[1508] 169. The kit or composition of any one of embodiments 163-168, where the nucleic acid comprises the first polynucleotide and the second polynucleotide.
[1509] 170. The kit or composition of any one of embodiments 163-169, comprising a first nucleic acid species comprising the first polynucleotide and a second nucleic acid species comprising the second polynucleotide.
[1510] 171. A nucleic acid comprising a promoter, operably linked to a polynucleotide encoding a first polypeptide, wherein the first polypeptide comprises a scaffold region comprising at least two first multimerizing regions or at least two second multimerizing regions, wherein each of the first multimerizing regions is different than each of the second multimerizing regions.
[1511] 172. The nucleic acid of embodiment 171, wherein the scaffold region consists essentially of at least two units of the first multimerizing region.
[1512] 173. The nucleic acid of embodiment 171, wherein the scaffold region consists essentially of at least two units of the second multimerizing region.
[1513] 174. The nucleic acid of any one of embodiments 171 to 173, wherein the first polypeptide consists essentially of the scaffold region.
[1514] 175. The nucleic acid of any one of embodiments 171 to 173, wherein the first polypeptide consists essentially of the scaffold region and a membrane association region.
[1515] 176. The nucleic acid of any one of embodiments 171-175, further comprising a second polynucleotide encoding a second chimeric polypeptide, wherein the second chimeric polypeptide comprises a pro-apoptotic polypeptide region and the first multimerizing region or the second multimerizing region, wherein the second multimerizing region has a different amino acid sequence than the first multimerizing region; wherein:
   [1516] the first multimerizing region and the second multimerizing region bind to a first ligand; and
   [1517] the first polypeptide comprises the first multimerizing region and the second chimeric polypeptide comprises the second multimerizing region, or the first polypeptide comprises the second multimerizing region and the second chimeric polypeptide comprises the first multimerizing region.
[1518] 177 The nucleic acid of embodiment 176, further comprising a promoter operably linked to the second polynucleotide.
[1519] 178. The nucleic acid of any one of embodiments 176-166, wherein the promoter is operably linked to the first polynucleotide and the second polynucleotide.
[1520] 179. The modified cell of any one of embodiments 176-178, wherein:
   [1521] the first ligand comprises a first portion,
   [1522] the first multimerizing region binds to the first portion, and
   [1523] the second multimerizing region does not significantly bind to the first portion.
[1524] 180. The nucleic acid of any one of embodiments 176-179, wherein the second multimerizing region binds to a second ligand, and the first multimerizing region does not significantly bind to the first multimerizing region.
[1525] 181 The nucleic acid of embodiment 180, wherein the first multimerizing region is not capable of binding to the second ligand.
[1526] 182. The nucleic acid of any one of embodiments 176-179, wherein the first multimerizing region binds to the first ligand and binds to a second ligand.
[1527] 183. The nucleic acid of embodiment 182, wherein the second ligand does not significantly bind to the second multimerizing region.
[1528] 184. The nucleic acid of embodiment 182, wherein the second multimerizing region is not capable of binding to the second ligand.
[1529] 185. The nucleic acid of any one of embodiments 171-184, wherein the first chimeric polypeptide further comprises a membrane-targeting polypeptide region.
[1530] 186. The nucleic acid of any one of embodiments 171-185, wherein the promoter is developmentally regulated and the chimeric polypeptides are expressed in developmentally differentiated cells.
[1531] 187. The nucleic acid of any one of embodiments 171-185, wherein the promoter is tissue-specific and the chimeric polypeptides are is expressed in the specific tissue.
[1532] 188. The nucleic acid of any one of embodiments 171-185, wherein the promoter is activated in activated T cells.
[1533] 189. A nucleic acid comprising a promoter, operably linked to a polynucleotide encoding a scaffold polypeptide, wherein the scaffold polypeptide comprises at least two FRB or FRB variant regions.
[1534] 190. A nucleic acid comprising a promoter, operably linked to a first polynucleotide encoding a scaffold polypeptide, wherein the scaffold polypeptide comprises at least two FRB or FRB variant regions, and a second polynucleotide encoding a chimeric polypeptide comprising an FKBP12 or FKBP12 variant region and a Caspase-9 polypeptide.
[1535] 191 A nucleic acid comprising a promoter, operably linked to a first polynucleotide encoding a scaffold polypeptide, wherein the scaffold polypeptide comprises at least two FKBP12 or FKBP12 variant regions, and a second polynucleotide encoding a chimeric polypeptide comprising a FRB or FRB variant region and a Caspase-9 polypeptide.
[1536] 192. A kit or composition comprising nucleic acid comprising a first polynucleotide and a second polynucleotide, wherein
   [1537] a) the first polynucleotide encodes a first polypeptide, wherein the first polypeptide comprises a scaffold region comprising at least two first multimerizing regions or at least two second multimerizing regions, wherein each of the first multimerizing regions is different than each of the second multimerizing regions; and
   [1538] b) the second polynucleotide encodes a second chimeric polypeptide, wherein the second chimeric polypeptide comprises a pro-apoptotic polypeptide region and the first multimerizing region or the second multimerizing region, wherein the second multimerizing region has a different amino acid sequence than the first multimerizing region; wherein:
   [1539] the first multimerizing region and the second multimerizing region bind to a first ligand; and
   [1540] the first polypeptide comprises the first multimerizing region and the second chimeric polypeptide comprises the second multimerizing region, or the first polypeptide comprises the second multimerizing region and the second chimeric polypeptide comprises the first multimerizing region.
[1541] 193. The kit or composition of embodiment 192, wherein the second multimerizing region binds to the first multimeric ligand and binds to a second multimeric ligand that does not significantly bind to the first multimerizing region.
[1542] 194. The kit or composition of any one of embodiments 192 or 193, wherein:
   [1543] the first ligand comprises a first portion,
   [1544] the first multimerizing region binds to the first portion, and
   [1545] the second multimerizing region does not significantly bind to the first portion.
[1546] 195. The kit or composition of any one of embodiments 193 or 193, wherein:
   [1547] the first ligand comprises a first monomer,
   [1548] the first multimerizing region binds to the first monomer, and
   [1549] the second multimerizing region does not significantly bind to the first monomer.
[1550] 196. The kit or composition of any one of embodiments 192-195, wherein the first multimerizing region is not capable of binding to the second multimeric ligand.
[1551] 197. The kit or composition of any one of embodiments 192-196, wherein the first and second multimerizing regions bind to rapamycin or a rapalog.
[1552] 198. The kit or composition of any one of embodiments 192-197, where the nucleic acid comprises the first polynucleotide and the second polynucleotide.
[1553] 199. The kit or composition of any one of embodiments 192-198, comprising a first nucleic acid species comprising the first polynucleotide and a second nucleic acid species comprising the second polynucleotide.
[1554] 200. A modified cell, transfected or transduced with a nucleic acid of any one of embodiments 179-191.
[1555] 201. A modified cell, comprising a polynucleotide encoding a first polypeptide, wherein the first polypeptide comprises a scaffold region comprising at least two first multimerizing regions or at least two second multimerizing regions, wherein each of the first multimerizing regions is different than each of the second multimerizing regions.
[1556] 202. The modified cell of embodiment 201, wherein the scaffold region consists essentially of at least two units of the first multimerizing region.
[1557] 203. The modified cell of embodiment 202, wherein the scaffold region consists essentially of at least two units of the second multimerizing region.
[1558] 204. The modified cell of any one of embodiments 201-203, wherein the first polypeptide consists essentially of the scaffold region.
[1559] 205. The modified cell of any one of embodiments 201 to 203, wherein the first polypeptide consists essentially of the scaffold region and a membrane association region.
[1560] 206. The modified cell of any one of embodiments 201 to 205, further comprising a second polynucleotide encoding a second chimeric polypeptide, wherein the second chimeric polypeptide comprises a pro-apoptotic polypeptide region and the first multimerizing region or the second multimerizing region, wherein the second multimerizing region has a different amino acid sequence than the first multimerizing region; wherein:
   [1561] the first multimerizing region and the second multimerizing region bind to a first ligand; and
   [1562] the first polypeptide comprises the first multimerizing region and the second chimeric polypeptide comprises the second multimerizing region, or the first polypeptide comprises the second multimerizing region and the second chimeric polypeptide comprises the first multimerizing region.
[1563] 207 The modified cell of any one of embodiments 201-206, wherein the second multimerizing region binds to the first ligand and binds to a second ligand.
[1564] 208. The modified cell of any one of embodiments 201-206, wherein the second ligand does not significantly bind to the first multimerizing regions.
[1565] 209. The modified cell of any one of embodiments 201-208, wherein:
   [1566] the first ligand comprises a first portion,
   [1567] the first multimerizing region binds to the first portion, and
   [1568] the second multimerizing region does not significantly bind to the first portion.
[1569] 210. The modified cell of any one of embodiments 201-208, wherein:
   [1570] the first ligand comprises a first monomer,
   [1571] the first multimerizing region binds to the first monomer, and
   [1572] the second multimerizing region does not significantly bind to the first monomer.
[1573] 211 The modified cell of any one of embodiments 201-208, wherein the first multimerizing regions are not capable of binding to the second ligand.
[1574] 212. The modified cell of any one of embodiments 201-208, wherein the first multimerizing region binds to the first ligand and binds to a second ligand.
[1575] 213. The modified cell of embodiment 212, wherein the second ligand does not significantly bind to the second multimerizing region.
[1576] 214. The modified cell of embodiment 212, wherein the second multimerizing region is not capable of binding to the second ligand.
[1577] 215. The modified cell of any one of embodiments 206-215, wherein the first chimeric polypeptide further comprises a membrane-targeting polypeptide region.
[1578] 216. A modified cell, comprising
   [1579] a) a first chimeric polypeptide, wherein the first chimeric polypeptide comprises a membrane-associated polypeptide region and a first multimerizing region; and
   [1580] b) a second chimeric polypeptide, wherein the second chimeric polypeptide comprises a pro-apoptotic polypeptide region and a second multimerizing region, wherein the second multimerizing region has a different amino acid sequence than the first multimerizing region;
      wherein the first and second multimerizing regions bind to a first multimeric ligand.
[1581] 217. The modified cell of embodiment 216, comprising a first polynucleotide that encodes the first chimeric polypeptide and a second polynucleotide that encodes the second polypeptide.
[1582] 218 A modified cell comprising a polynucleotide encoding a scaffold polypeptide, wherein the scaffold polypeptide comprises at least two FRB or FRB variant regions.
[1583] 219. A modified cell comprising a first polynucleotide encoding a scaffold polypeptide, wherein the scaffold polypeptide comprises at least two FRB or FRB variant regions, and a second polynucleotide encoding a chimeric polypeptide comprising an FKBP12 or FKBP12 variant region and a Caspase-9 polypeptide.
[1584] 220. A modified cell comprising a first polynucleotide encoding a scaffold polypeptide, wherein the scaffold polypeptide comprises at least two FKBP12 or FKBP12 variant regions, and a second polynucleotide encoding a chimeric polypeptide comprising a FRB or FRB variant and a Caspase-9 polypeptide.
[1585] 221. The modified cell of any one of embodiments 153-162, or 201-220, wherein the cell further comprises a chimeric antigen receptor.
[1586] 222. The modified cell of any one of embodiments 153-162, or 201-220, wherein the cell further comprises a T cell receptor.
[1587] 223. The modified cell of any one of embodiments 153-162, or 201-222, wherein the cell is a T cell, tumor infiltrating lymphocyte, NK-T cell, or NK cell.
[1588] 224. The modified cell of any one of embodiments 1153-162, or 201-222, wherein the cell is a T cell.
[1589] 225. The modified cell of any one of embodiments 153-162, or 201-222, wherein the cell is a primary T cell.
[1590] 226. The modified cell of any one of embodiments 153-162, or 201-222, wherein the cell is a cytotoxic T cell.
[1591] 227. The modified cell of any one of embodiments 153-162, or 201-222 wherein the cell is selected from the group consisting of embryonic stem cell (ESC), induced pluripotent stem cell (iPSC), non-lymphocytic hematopoietic cell, non-hematopoietic cell, macrophage, keratinocyte, fibroblast, melanoma cell, tumor infiltrating lymphocyte, natural killer cell, natural killer T cell, or T cell.
[1592] 228. The modified cell of any one of embodiments 153-162, or 201-222, wherein the T cell is a helper T cell.
[1593] 229. The modified cell of any one of embodiments 153-162, or 201-228, wherein the cell is obtained or prepared from bone marrow.
[1594] 230. The modified cell of any one of embodiments 153-162, or 201-228, wherein the cell is obtained or prepared from umbilical cord blood.
[1595] 231. The modified cell of any one of embodiments 153-152, or 201-228, wherein the cell is obtained or prepared from peripheral blood.
[1596] 232. The modified cell of any one of embodiments 153-152, or 201-228, wherein the cell is obtained or prepared from peripheral blood mononuclear cells.
[1597] 233. The modified cell of any one of embodiments 153-152, or 201-232, wherein the cell is a human cell.
[1598] 234. The modified cell of any one of embodiments 153-152, or 201-233, wherein the modified cell is transduced or transfected in vivo.
[1599] 235. The modified cell of any one of embodiments 153-152, or 201-234, wherein the cell is transfected or transduced by the nucleic acid vector using a method selected from the group consisting of electroporation, sonoporation, biolistics (e.g., Gene Gun with Au-particles), lipid transfection, polymer transfection, nanoparticles, or polyplexes.
[1600] 236. A method of controlling survival of transplanted modified cells in a subject, comprising:
   [1601] a) transplanting modified cells of any one of embodiments 153-152, or 201-235 into the subject; and
   [1602] b) after (a), administering to the subject rapamycin or a rapalog, in an amount effective to kill less than 30% of the modified cells that express the second chimeric polypeptide comprising the pro-apoptotic polypeptide region.
[1603] 237. A method of administering rapamycin or a rapalog to a human subject who has undergone cell therapy using modified cells comprising administering rapamycin or a rapalog to the human subject, wherein the modified cells comprise a nucleic acid of any one of embodiments 153-152, or 201-235, wherein the rapamycin or rapalog binds to a FRB or FRB variant region.
[1604] 238. The method of any one of embodiments 236-237, wherein the rapamycin or rapalog is administered in an amount effective to kill less than 40% of the modified cells that express the chimeric caspase polypeptide.
[1605] 239. The method of any one of embodiments 236-237, wherein the rapamycin or rapalog is administered in an amount effective to kill less than 50% of the modified cells that express the chimeric caspase polypeptide.
[1606] 240. The method of any one of embodiments 236-237, wherein the rapamycin or rapalog is administered in an amount effective to kill less than 60% of the modified cells that express the chimeric caspase polypeptide.
[1607] 241. The method of embodiments 236-237, wherein the rapamycin or rapalog is administered in an amount effective to kill less than 70% of the modified cells that express the chimeric caspase polypeptide.
[1608] 242. The method of any one of embodiments 236-237, wherein the first ligand is administered in an amount effective to kill less than 90% of the modified cells that express the second chimeric polypeptide.
[1609] 243. The method of any one of embodiments 236-237, wherein the first ligand is administered in an amount effective to kill at least 90% of the modified cells that express the second chimeric polypeptide.
[1610] 244. The method of any one of embodiments 236-237, wherein the first ligand is administered in an amount effective to kill at least 95% of the modified cells that express the second chimeric polypeptide.
[1611] 245. The method of any one of embodiments 236-237, wherein more than one dose of the first ligand is administered to the subject.
[1612] 246. The method of embodiment 245, wherein more than one dose of rapamycin, or the rapalog is administered.
[1613] 247. The method of any one of embodiments 236-246, wherein the second multimerizing region is a FKBP12 or FKBP12 variant region, further comprising administering a ligand that binds to the FKBP12 or FKBP12 variant region on the second chimeric polypeptide comprising the pro-apoptotic polypeptide region in an amount effective to kill at least 90% of the modified cells that express the second chimeric polypeptide.
[1614] 248. A method of administering a ligand to a human subject who has undergone cell therapy using modified cells comprising administering the ligand to the human subject, wherein the modified cells comprise a modified cell of any one of embodiments 153-162, or 201-235, wherein the ligand binds to a FKBP12 or FKBP12 variant region.
[1615] 249. A method of controlling survival of transplanted modified cells in a subject, comprising:
   [1616] a) transplanting modified cells of any one of embodiments 153-152, or 201-228 into the subject; and
   [1617] b) after (a), administering to the subject a ligand that binds to the FKBP12 or FKBP12 variant region on the second chimeric polypeptide comprising the pro-apoptotic polypeptide region in an amount effective to kill at least 90% of the modified cells that express the second chimeric polypeptide.
[1618] 250. The method of embodiment 249, wherein more than one dose of the ligand, rapamycin, or the rapalog is administered.
[1619] 251. The method of any one of embodiments 236-250, further comprising
   [1620] identifying a presence or absence of a condition in the subject that requires the removal of transfected or transduced modified cells from the subject; and
   [1621] administering a rapamycin or a rapalog, or a ligand that binds to the FKBP12 or FKBP12 variant region, maintaining a subsequent dosage, or adjusting a subsequent dosage to the subject based on the presence or absence of the condition identified in the subject.
[1622] 252. The method of any one of embodiments 236-250, further comprising
[1623] identifying a presence or absence of a condition in the subject that requires the removal of transfected or transduced therapeutic cells from the subject; and
   [1624] determining whether a ligand that binds to the FKBP12 or FKBP12 variant region, or rapamycin or a rapalog should be administered to the subject, or the dosage of the ligand subsequently administered to the subject is adjusted based on the presence or absence of the condition identified in the subject.
[1625] 253. The method of any one of embodiments 236-250, further comprising
[1626] receiving information comprising presence or absence of a condition in the subject that requires the removal of transfected or transduced modified cells from the subject; and
[1627] administering rapamycin or a rapalog, or a ligand that binds to the FKBP12 or FKBP12 variant region, maintaining a subsequent dosage, or adjusting a subsequent dosage to the subject based on the presence or absence of the condition identified in the subject.
[1628] 254. The method of any one of embodiments 236-250, further comprising
[1629] identifying a presence or absence of a condition in the subject that requires the removal of transfected or transduced modified cells from the subject; and
[1630] transmitting the presence, absence or stage of the condition identified in the subject to a decision maker who administers rapamycin, a rapalog, or a ligand that binds to the FKBP12 or FKBP12 variant region, maintains a subsequent dosage, or adjusts a subsequent dosage administered to the subject based on the presence, absence or stage of the condition identified in the subject.
[1631] 255. The method of any one of embodiments 236-260, further comprising
[1632] identifying a presence or absence of a condition in the subject that requires the removal of transfected or transduced modified cells from the subject; and
[1633] transmitting an indication to administer rapamycin, a rapalog, or a ligand that binds to the FKBP12 or FKBP12 variant region, maintains a subsequent dosage, or adjusts a subsequent dosage administered to the subject based on the presence, absence or stage of the condition identified in the subject.
[1634] 256. The method of embodiment 255, wherein alloreactive modified cells are present in the subject and the number of alloreactive modified cells is reduced by at least 90% after administration of rapamycin, the rapalog, or the ligand.
[1635] 257. The method of any one of embodiments 236-256, wherein at least 1×10⁶ transduced or transfected modified cells are administered to the subject.
[1636] 258. The method of any one of embodiments 236-256, wherein at least 1×10⁷ transduced or transfected modified cells are administered to the subject.
[1637] 259. The method of any one of embodiments 236-256, wherein at least 1×10⁸ transduced or transfected modified cells are administered to the subject.
[1638] 260. The method of any one of embodiments 236-259, further comprising
   [1639] identifying the presence, absence or stage of graft versus host disease in the subject, and
   [1640] administering rapamycin, a rapalog, or a ligand that binds to the FKBP12 or FKBP12 variant region, maintaining a subsequent dosage, or adjusting a subsequent dosage to the subject based on the presence, absence or stage of the graft versus host disease identified in the subject.
[1641] 261. A method of administering a ligand to a human subject who has undergone cell therapy using modified cells comprising administering the ligand to the human subject, wherein the modified cells comprise a modified cell of any one of embodiments 153-162 or 201-235, wherein the ligand binds to a FKBP12 or FKBP12 variant region.
[1642] 262. A method of administering rapamycin or a rapalog to a human subject who has undergone cell therapy using modified cells comprising administering rapamycin or a rapalog to the human subject, wherein the modified cells comprise a modified cell of any one of embodiments 153-162 or 201-235, wherein the rapamycin or rapalog binds to a FRB or FRB variant region.
[1643] 263 The nucleic acid, cell, or method of any one of embodiments 137-262, wherein the nucleic acid or cell comprises a chimeric polypeptide comprising an FKBP12 or FKBP12 variant region and the ligand that binds to the FKBP12 or FKBP12 variant region is selected from the group consisting of AP1903, AP20187, and AP1510.
[1644] 264. A method for treating a subject having a disease or condition associated with an elevated expression of a target antigen expressed by a target cell, comprising (a) administering to the subject an effective amount of a modified cell of any one of embodiments 153-162 or 201-235, wherein the modified cell further comprises a polynucleotide coding for a chimeric antigen receptor or a T cell receptor that bind to the target antigen; and (b) after a), administering an effective amount of a ligand, rapamycin, or a rapalog.
[1645] 265. The method of embodiment 264, wherein the target antigen is a tumor antigen.
[1646] 266. A method for expressing a first chimeric polypeptide comprising a scaffold region and a second chimeric polypeptide comprising a pro-apoptotic polypeptide, comprising contacting a nucleic acid of any one of embodiments 171-191 with a cell under conditions in which the nucleic acid is incorporated into the cell, whereby the cell expresses the first and second chimeric polypeptides from the incorporated nucleic acid.
[1647] 267. A method for expressing a first chimeric polypeptide comprising a promoter operably linked to a polynucleotide coding for a polypeptide comprising a FRB or FRB variant region and a caspase polypeptide region, comprising contacting a nucleic acid of any one of embodiments 171-191 with a cell under conditions in which the nucleic acid is incorporated into the cell, whereby the cell expresses the first and second chimeric polypeptides from the incorporated nucleic acid.
[1648] 268. A method for expressing a chimeric polypeptide comprising a FRB or FRB variant region and a caspase polypeptide region, comprising contacting a nucleic acid of any one of embodiments 137-143 or 145-152 with a cell under conditions in which the nucleic acid is incorporated into the cell, whereby the cell expresses the chimeric polypeptide from the incorporated nucleic acid.
[1649] 269. The method of any one of embodiments 266-268, wherein the nucleic acid is contacted with the cell ex vivo.
[1650] 270 The method of any one of embodiments 266-268, wherein the nucleic acid is contacted with the cell in vivo.
[1651] 271. The modified cell of any one of embodiments 1-41, 81-115, 121-129, 153-162, or 200-235, comprising the first ligand or the second ligand.
[1652] 272. The nucleic acid, cell, or method of any one of embodiments 171-272, wherein the first chimeric polypeptide further comprises an antigen recognition moiety.
[1653] 273. The nucleic acid, cell, or method of any one of embodiments 171-272, wherein the first chimeric polypeptide further comprises a marker polypeptide.
[1654] 274. The nucleic acid, cell, or method of any one of embodiments 171-272, wherein the first chimeric polypeptide further comprises a T cell receptor.
[1655] 275. The nucleic acid, cell, or method of any one of embodiments 171-272, wherein the first chimeric polypeptide further comprises a chimeric antigen receptor.
[1656] 276. The nucleic acid, cell, or method of any one of embodiments 221, 223-272, or 275, wherein the chimeric antigen receptor comprises (i) a transmembrane region, (ii) a T cell activation molecule, and (iii) an antigen recognition moiety.
[1657] 277. The nucleic acid of embodiment 276, wherein the chimeric antigen receptor further comprises a costimulatory polypeptide.
[1658] 278. The nucleic acid of embodiment 277, wherein the costimulatory polypeptide is selected from the group consisting of CD28, OX40 and 4-1 BB.
[1659] 279. The nucleic acid, cell, or method of embodiment 276, wherein the chimeric antigen receptor comprises (i) a transmembrane region, (ii) a MyD88 polypeptide or a truncated MyD88 polypeptide lacking a TIR domain, (iii) a CD40 cytoplasmic polypeptide region lacking a CD40 extracellular domain and (iv) a T cell activation molecule, (v) an antigen recognition moiety.
[1660] 280. The nucleic acid, cell, or method of any one of embodiments 171-272, wherein the first chimeric polypeptide further comprises (i) a MyD88 polypeptide or a truncated MyD88 polypeptide lacking a TIR domain, and (ii) a CD40 cytoplasmic polypeptide region lacking a CD40 extracellular domain.
[1661] 281. The nucleic acid, cell, or method of any one of embodiments 171-272, wherein the first chimeric polypeptide further comprises a MyD88 polypeptide or a truncated MyD88 polypeptide lacking a TIR domain.
[1662] 282. The nucleic acid, cell, or method of any one of embodiments 171-272, wherein the first chimeric polypeptide further comprises a CD40 cytoplasmic polypeptide region lacking a CD40 extracellular domain.
[1663] 283. The nucleic acid, cell, or method of any one of embodiments 137-282, wherein the first ligand is rapamycin or a rapalog.
[1664] 284. The nucleic acid, cell, or method of any one of embodiments 137-283, wherein the second ligand is selected from the group consisting of AP1903, AP20187, and AP1510.
[1665] 285. The nucleic acid, cell, or method of any one of embodiments 145-284, wherein the first multimerizing regions are FRB or FRB variant regions, and the second multimerizing region is an FKBP12 or FKBP12 variant region.
[1666] 286. The nucleic acid, cell, or method of any one of embodiments 145-284, wherein the first multimerizing regions are FKBP12 or FKBP12 variant regions and the second multimerizing region is an FRB or FRB variant region.
[1667] 287. The nucleic acid, cell, or method of any one of embodiments 171-286, wherein the first chimeric polypeptide comprises a scaffold region having at least three first multimerizing regions.
[1668] 288. The nucleic acid, cell, or method of any one of embodiments 171-286, wherein the first chimeric polypeptide comprises a scaffold region having at least four first multimerizing regions.
[1669] 289. The nucleic acid, cell, or method of any one of embodiments 171-286, wherein the first chimeric polypeptide comprises a scaffold region having at least five first multimerizing regions.
[1670] 290. The nucleic acid, cell, or method of any one of embodiments 171-286, wherein the first chimeric polypeptide comprises a scaffold region having 6-10 first multimerizing regions.
[1671] 291. The nucleic acid, cell, or method, cell, or method of embodiment 171-290, or wherein the first chimeric polypeptide comprises a membrane targeting region selected from the group consisting of a myristoylation region, palmitoylation region, prenylation region, NKG2D receptor, and transmembrane sequences of receptors.
[1672] 292. The nucleic acid, cell, or method, cell, or method of embodiment 291, wherein the membrane-targeting region is a myristoylation region.
[1673] 293. The nucleic acid, cell, or method of embodiment 292, wherein the myristoylation region has an amino acid sequence of SEQ ID NO: 3 or a functional fragment thereof.
[1674] 294. The nucleic acid, cell, or method of any one of embodiments 137-293, wherein the first or second multimerizing region is an FKBP12 variant region that has an amino acid substitution at position 36 selected from the group consisting of valine, leucine, isoleuceine and alanine.
[1675] 295 The nucleic acid, cell, or method of embodiment 294, wherein the first or second multimerizing region is an FKBP12v36 region.
[1676] 296. The nucleic acid, cell, or method of any one of embodiments 137-293, wherein the second multimerizing region is a selected from the group consisting of KLW (T2098L), KTF (W2101F), and KLF (T2098L, W2101F).
[1677] 297. The nucleic acid, cell, or method embodiment 296, wherein second multimerizing region is FRB_{L}
[1678] 298. The nucleic acid, cell, or method of any one of embodiments 137-297, wherein the first or second ligand is a rapalog that is selected from the group consisting of S-o,p-dimethoxyphenyl (DMOP)-rapamycin, R-Isopropoxyrapamycin, and S-Butanesulfonamidorap.
[1679] 299. The nucleic acid, cell, or method of any one of embodiments 137-298, wherein the pro-apoptotic polypeptide is selected from the group consisting of caspase 1, 2, 3, 4, 5, 6, 7, 8, 9, 10, 11, 12, 13, or 14, FADD (DED), APAF1 (CARD), CRADD/RAIDD CARD), ASC (CARD), Bax, Bak, Bcl-xL, Bcl-2, RIPK3, and RIPK1-RHIM.
[1680] 300. The nucleic acid, cell, or method of any one of embodiments 137-298, wherein the pro-apoptotic polypeptide is a caspase polypeptide.
[1681] 301 The nucleic acid, cell, or method of embodiment 300, wherein the pro-apoptotic polypeptide is a Caspase-9 polypeptide.
[1682] 302. The nucleic acid, cell, or method of any one of embodiments 300 or 301, wherein the caspase polypeptide comprises the amino acid sequence of SEQ ID NO: 300.
[1683] 303. The nucleic acid, cell, or method of embodiment 302, wherein the caspase polypeptide is a modified Caspase-9 polypeptide comprising an amino acid substitution selected from the group consisting of the catalytically active caspase variants in Tables 5 or 6.
[1684] 304. The nucleic acid, cell, or method of embodiment 302, wherein the caspase polypeptide is a modified Caspase-9 polypeptide comprising an amino acid sequence selected from the group consisting of D330A, D330E, and N405Q.
[1685] 305. The nucleic acid, cell, or method of any one of embodiments 279-304, wherein the truncated MyD88 polypeptide has the amino acid sequence of SEQ ID NO: 214, or a functional fragment thereof.
[1686] 306. The nucleic acid, cell, or method of any one of embodiments 279-305, wherein the MyD88 polypeptide has the amino acid sequence of SEQ ID NO: 282, or a functional fragment thereof.
[1687] 307. The nucleic acid, cell, or method of any one of embodiments 279-307, wherein the cytoplasmic CD40 polypeptide has the amino acid sequence of SEQ ID NO: 216, or a functional fragment thereof.
[1688] 308. The nucleic acid, cell, or method of any one of embodiments 279 or 274-307, wherein the T cell receptor binds to an antigenic polypeptide selected from the group consisting of PRAME, Bob-1, and NY-ESO-1.
[1689] 309. The nucleic acid, cell, or method of any one of embodiments 276-307, wherein the antigen recognition moiety binds to an antigen selected from the group consisting of an antigen on a tumor cell, an antigen on a cell involved in a hyperproliferative disease, a viral antigen, a bacterial antigen, CD19, PSCA, Her2/Neu, PSMA, Muc1, Muc1, ROR1, Mesothelin, GD2, CD123, Muc16, CD33, CD38, and CD44v6.
[1690] 310. The nucleic acid, cell, or method of any one of embodiments 276 or 309, wherein the T cell activation molecule is selected from the group consisting of an ITAM-containing, Signal 1 conferring molecule, a CD3 ζ polypeptide, and an Fc epsilon receptor gamma (FcεR1γ) subunit polypeptide.
[1691] 311. The nucleic acid, cell, or method of any one of embodiments 276-310, wherein the antigen recognition moiety is a single chain variable fragment.
[1692] 312. The nucleic acid, cell, or method of any one of embodiments 276-311, wherein the transmembrane region is a CD8 transmembrane region.
[1693] 313. The nucleic acid of any one of embodiments 137-143, 145-152, 171-191, or 272-312, wherein the nucleic acid is contained within a viral vector.
[1694] 314. The nucleic acid of embodiment 313, wherein the viral vector is selected from the group consisting of retroviral vector, murine leukemia virus vector, SFG vector, adenoviral vector, lentiviral vector, adeno-associated virus (AAV), Herpes virus, and Vaccinia virus.
[1695] 315. The nucleic acid of any one of embodiments 137-143, 145-152, 171-191, or 272-312, wherein the nucleic acid is prepared or in a vector designed for electroporation, sonoporation, or biolistics, or is attached to or incorporated in chemical lipids, polymers, inorganic nanoparticles, or polyplexes.
[1696] 316. The nucleic acid of any one of embodiments 137-143, 145-152, 171-191, or 272-312, wherein the nucleic acid is contained within a plasmid.
[1697] 317. The nucleic acid or cell of any one of embodiments 137-235 or 272-316, or 224-262, comprising a polynucleotide coding for a polypeptide provided in the tables of Example 23.
[1698] 318. The nucleic acid or cell of any one of embodiments 137-143, 145-152, 171-191, or 272-312, comprising a polynucleotide coding for a polypeptide provided in the tables of Example 23 selected from group consisting of FKBPv36, FpK′, FpK, Fv, Fv′, FKBPpK′, FKBPpK″, and FKBPpK′″.
[1699] 319. The nucleic acid or cell of any one of embodiments 137-143, 145-152, 171-191, or 272-312, comprising a polynucleotide coding for a polypeptide provided in the tables of Example 23 selected from group consisting of FRP5-VL, FRP5-VH, FMC63-VL, and FMC63-VH.
[1700] 320. The nucleic acid or cell of embodiment 319, comprising a polynucleotide coding for FRP5-VL and FRP5-VH.
[1701] 321. The nucleic acid or cell of embodiment 319, comprising a polynucleotide coding for FMC63-VL and FMC63-VH.
[1702] 322. The nucleic acid or cell of embodiment 317, comprising a polynucleotide coding for a polypeptide provided in the tables of Example 23 selected from group consisting of MyD88L and MyD88.
[1703] 323. The nucleic acid or cell of embodiment 317, comprising a polynucleotide coding for a ΔCaspase-9 polypeptide provided in the tables of Example 23.
[1704] 324. The nucleic acid or cell of embodiment 317, comprising a polynucleotide coding for a ΔCD19 polypeptide provided in the tables of Example 23.
[1705] 325. The nucleic acid or cell of embodiment 317, comprising a polynucleotide coding for a hCD40 polypeptide provided in the tables of Example 23.
[1706] 326. The nucleic acid or cell of embodiment 317, comprising a polynucleotide coding for a CD3zeta polypeptide provided in the tables of Example 23.
[1707] 327. The method of any one of embodiments 236-311, wherein the subject has cancer.
[1708] 328. The method of any one of embodiments 236-311 or 327, wherein the modified cell is delivered to a tumor bed.
[1709] 329. The method of any one of embodiments 327-328, wherein the cancer is present in the blood or bone marrow of the subject.
[1710] 330. The method of embodiment 329, wherein the subject has a blood or bone marrow disease.
[1711] 331. The method of any one of embodiments 236-311 or 327, wherein the subject has been diagnosed with sickle cell anemia or metachromatic leukodystrophy.
[1712] 332. The method of any one of embodiments 236-311 or 327, wherein the patient has been diagnosed with a condition selected from the group consisting of a primary immune deficiency condition, hemophagocytosis lymphohistiocytosis (HLH) or other hemophagocytic condition, an inherited marrow failure condition, a hemoglobinopathy, a metabolic condition, and an osteoclast condition.
[1713] 333. The method of any one of embodiments 236-311 or 327, wherein the patient has been diagnosed with a disease or condition selected from the group consisting of Severe Combined Immune Deficiency (SCID), Combined Immune Deficiency (CID), Congenital T-cell Defect/Deficiency, Common Variable Immune Deficiency (CVID), Chronic Granulomatous Disease, IPEX (Immune deficiency, polyendocrinopathy, enteropathy, X-linked) or IPEX-like, Wiskott-Aldrich Syndrome, CD40 Ligand Deficiency, Leukocyte Adhesion Deficiency, DOCA 8 Deficiency, IL-10 Deficiency/IL-10 Receptor Deficiency, GATA 2 deficiency, X-linked lymphoproliferative disease (XLP), Cartilage Hair Hypoplasia, Shwachman Diamond Syndrome, Diamond Blackfan Anemia, Dyskeratosis Congenita, Fanconi Anemia, Congenital Neutropenia, Sickle Cell Disease, Thalassemia, Mucopolysaccharidosis, Sphingolipidoses, and Osteopetrosis.
[1714] 334. A nucleic acid comprising a promoter, operably linked to
   [1715] a) a first polynucleotide encoding a first chimeric polypeptide, wherein the first chimeric polypeptide comprises (i) two FKBP12v36 regions; (ii) a truncated MyD88 polypeptide region lacking the TIR domain; and (iii) a CD40 cytoplasmic polypeptide region lacking the CD40 extracellular domain;
   [1716] b) a second polynucleotide encoding a second chimeric polypeptide, wherein the second chimeric polypeptide comprises a Caspase-9 region and a FRB_{L}; and
   [1717] c) a third polynucleotide encoding a chimeric antigen receptor comprising a transmembrane region, a T cell activation molecule, and an antigen recognition moiety selected from the group consisting of Her2/Neu, PSCA, and CD19.
[1718] 335. A modified cell, comprising
   [1719] a) a first polynucleotide encoding a first chimeric polypeptide, wherein the first chimeric polypeptide comprises (i) two FKBP12v36 regions; (ii) a truncated MyD88 polypeptide region lacking the TIR domain; and (iii) a CD40 cytoplasmic polypeptide region lacking the CD40 extracellular domain;
   [1720] b) a second polynucleotide encoding a second chimeric polypeptide, wherein the second chimeric polypeptide comprises a Caspase-9 region and a FRB_{L}; and
   [1721] c) a third polynucleotide encoding a chimeric antigen receptor comprising a transmembrane region, a T cell activation molecule, and a Her2/Neu antigen recognition moiety.
[1722] 336. A nucleic acid comprising a promoter, operably linked to
   [1723] a) a first polynucleotide encoding a first chimeric polypeptide, wherein the first chimeric polypeptide comprises (i) two FKBP12v36 regions; (ii) a truncated MyD88 polypeptide region lacking the TIR domain; and (iii) a CD40 cytoplasmic polypeptide region lacking the CD40 extracellular domain;
   [1724] b) a second polynucleotide encoding a second chimeric polypeptide, wherein the second chimeric polypeptide comprises a Caspase-9 region and a FRB_{L}; and
   [1725] c) a third polynucleotide encoding a chimeric T cell receptor.
[1726] 337. A modified cell, comprising
   [1727] a) a first polynucleotide encoding a first chimeric polypeptide, wherein the first chimeric polypeptide comprises (i) two FKBP12v36 regions; (ii) a truncated MyD88 polypeptide region lacking the TIR domain; and (iii) a CD40 cytoplasmic polypeptide region lacking the CD40 extracellular domain;
   [1728] b) a second polynucleotide encoding a second chimeric polypeptide, wherein the second chimeric polypeptide comprises a Caspase-9 region and a FRB_{L}; and
   [1729] c) a third polynucleotide encoding a chimeric T cell receptor.

[1730] The entirety of each patent, patent application, publication and document referenced herein hereby is incorporated by reference. Citation of the above patents, patent applications, publications and documents is not an admission that any of the foregoing is pertinent prior art, nor does it constitute any admission as to the contents or date of these publications or documents.

[1731] Modifications may be made to the foregoing without departing from the basic aspects of the technology. Although the technology has been described in substantial detail with reference to one or more specific embodiments, those of ordinary skill in the art will recognize that changes may be made to the embodiments specifically disclosed in this application, yet these modifications and improvements are within the scope and spirit of the technology.

[1732] The technology illustratively described herein suitably may be practiced in the absence of any element(s) not specifically disclosed herein. Thus, for example, in each instance herein any of the terms “comprising,” “consisting essentially of,” and “consisting of” may be replaced with either of the other two terms. The terms and expressions which have been employed are used as terms of description and not of limitation, and use of such terms and expressions do not exclude any equivalents of the features shown and described or portions thereof, and various modifications are possible within the scope of the technology claimed. The term “a” or “an” can refer to one of or a plurality of the elements it modifies (e.g., “a reagent” can mean one or more reagents) unless it is contextually clear either one of the elements or more than one of the elements is described. The term “about” as used herein refers to a value within 10% of the underlying parameter (i.e., plus or minus 10%), and use of the term “about” at the beginning of a string of values modifies each of the values (i.e., “about 1, 2 and 3” refers to about 1, about 2 and about 3). For example, a weight of “about 100 grams” can include weights between 90 grams and 110 grams. Further, when a listing of values is described herein (e.g., about 50%, 60%, 70%, 80%, 85% or 86%) the listing includes all intermediate and fractional values thereof (e.g., 54%, 85.4%). Thus, it should be understood that although the present technology has been specifically disclosed by representative embodiments and optional features, modification and variation of the concepts herein disclosed may be resorted to by those skilled in the art, and such modifications and variations are considered within the scope of this technology.

[1733] Certain embodiments of the technology are set forth in the claim(s) that follow(s).

What is claimed is:

1. A nucleic acid comprising a promoter, operably linked to
a) a first polynucleotide encoding a first chimeric polypeptide, wherein the first chimeric polypeptide comprises (i) a first multimerizing region or a second multimerizing region; (ii) a MyD88 polypeptide region or a truncated MyD88 polypeptide region lacking the TIR domain; and (iii) a CD40 cytoplasmic polypeptide region lacking the CD40 extracellular domain; and
b) a second polynucleotide encoding a second chimeric polypeptide, wherein the second chimeric polypeptide comprises (i) a pro-apoptotic polypeptide region and (ii) the first multimerizing region or the second multimerizing region, wherein:
the second multimerizing region has a different amino acid sequence than the first multimerizing region;
the first chimeric polypeptide comprises the first multimerizing region and the second chimeric polypeptide comprises the second multimerizing region, or the first chimeric polypeptide comprises the second multimerizing region and the second chimeric polypeptide comprises the first multimerizing region;
the first multimerizing region and the second multimerizing region bind to a first ligand;
the first multimerizing region binds to a second ligand; and
the second ligand does not significantly bind to the second multimerizing region.

2. A nucleic acid comprising a promoter, operably linked to
a) a first polynucleotide encoding a first chimeric polypeptide, wherein the first chimeric polypeptide comprises (i) a first multimerizing region or a second multimerizing region; and (ii) a MyD88 polypeptide region or a truncated MyD88 polypeptide region lacking the TIR domain; and
b) a second polynucleotide encoding a second chimeric polypeptide, wherein the second chimeric polypeptide comprises (i) a pro-apoptotic polypeptide region and (ii) the first multimerizing region or the second multimerizing region, wherein
the second multimerizing region has a different amino acid sequence than the first multimerizing region;
the first chimeric polypeptide comprises the first multimerizing region and the second chimeric polypeptide comprises the second multimerizing region, or the first chimeric polypeptide comprises the second multimerizing region and the second chimeric polypeptide comprises the first multimerizing region;
the first multimerizing region and the second multimerizing region bind to a first ligand;
the first multimerizing region binds to a second ligand; and
the second ligand does not significantly bind to the second multimerizing region.

3. The nucleic acid of claim 1, wherein:
the first ligand comprises a first portion,
the first multimerizing region binds to the first portion, and
the second multimerizing region does not significantly bind to the first portion.

4. The nucleic acid of claim 3, wherein the second ligand is not capable of binding to the second multimerizing region.

5. The nucleic acid of 4, wherein the first multimerizing region is a FKBP12 or FKBP12 variant region and the second multimerizing region is a FKBP-12-Rapamycin Binding (FRB) or FRB variant region.

6. The nucleic acid of claim 5, wherein the first ligand is rapamycin or a rapalog, and the second ligand is selected from the group consisting of AP1903, AP20187, and AP1510.

7. The nucleic acid of claim 1, wherein,
a) the first polynucleotide encodes the first chimeric polypeptide, wherein the first chimeric polypeptide comprises (i) a FKBP12 or FKBP12 variant region; (ii) a MyD88 polypeptide region or a truncated MyD88 polypeptide region lacking the TIR domain; and (iii) a CD40 cytoplasmic polypeptide region lacking the CD40 extracellular domain; and
b) the second polynucleotide encodes the second chimeric polypeptide, wherein the second chimeric polypeptide comprises a Caspase-9 region and a FRB or FRB variant region.

8. The nucleic acid of claim 1, wherein
a) the first polynucleotide encodes the first chimeric polypeptide, wherein the first chimeric polypeptide comprises (i) at least two FKBP12 or FKBP12 variant regions; (ii) a MyD88 polypeptide region or a truncated MyD88 polypeptide region lacking the TIR domain; and (iii) a CD40 cytoplasmic polypeptide region lacking the CD40 extracellular domain; and
b) the second polynucleotide encodes the second chimeric polypeptide, wherein the second chimeric polypeptide comprises a Caspase-9 region and a FRB or FRB variant region.

9. A modified cell, transduced or transfected with a nucleic acid of claim 8.

10. A modified cell, comprising
a) a first polynucleotide encoding a first chimeric polypeptide, wherein the first chimeric polypeptide comprises (i) a first multimerizing region or a second multimerizing region; (ii) a MyD88 polypeptide region or a truncated MyD88 polypeptide region lacking the TIR domain; and (iii) a CD40 cytoplasmic polypeptide region lacking the CD40 extracellular domain; and
b) a second polynucleotide encoding a second chimeric polypeptide, wherein the second chimeric polypeptide comprises (i) a pro-apoptotic polypeptide region and (ii) the first multimerizing region or the second multimerizing region, wherein:
the second multimerizing region has a different amino acid sequence than the first multimerizing region;
the first chimeric polypeptide comprises the first multimerizing region and the second chimeric polypeptide comprises the second multimerizing region, or the first chimeric polypeptide comprises the second multimerizing region and the second chimeric polypeptide comprises the first multimerizing region;
the first multimerizing region and the second multimerizing region bind to a first ligand;
the first multimerizing region binds to a second ligand; and
the second ligand does not significantly bind to the second multimerizing region.

11. The modified cell of claim 10, wherein the second ligand is not capable of binding to the second multimerizing region.

12. A method of controlling survival of transplanted modified cells in a subject, comprising
a) transplanting modified cells of claim 10 into the subject; and
b) after (a), administering to the subject the first ligand in an amount effective to kill less than 30% of the modified cells that express the second chimeric polypeptide
wherein the first chimeric polypeptide comprises the first multimerizing region and the second chimeric polypeptide comprises the second multimerizing region.

13. A method for treating a subject having a disease or condition associated with an elevated expression of a target antigen expressed by a target cell, comprising
(a) transplanting an effective amount of modified cells into the subject; wherein the modified cells comprise a modified cell of claim 10, wherein the modified cell comprises a chimeric antigen receptor comprising an antigen recognition moiety that binds to the target antigen, and
(b) after a), administering an effective amount of the second ligand to reduce the number or concentration of target antigen or target cells in the subject wherein the first chimeric polypeptide comprises the first multimerizing region and the second chimeric polypeptide comprises the second multimerizing region.

14. The method of claim 13, further comprising, after b), administering the first ligand in an amount effective to kill less than 30% of the modified cells that express the second chimeric polypeptide.

15. The method of claim 13, wherein the first multimerizing region comprises two FKBP12v36 regions, and the second multimerizing region comprises an FRB or FRB variant region.

16. The nucleic acid of claim 1, wherein the pro-apoptotic polypeptide is a caspase polypeptide.

17. A nucleic acid comprising a promoter, operably linked to a first polynucleotide and a second polynucleotide, wherein
a) the first polynucleotide encodes a first chimeric apoptotic polypeptide comprising a first multimerizing region and a pro-apoptotic polypeptide region; and
b) the second polynucleotide encodes a second chimeric apoptotic polypeptide comprising a second multimerizing region and a pro-apoptotic polypeptide region, wherein the second multimerizing region has a different amino acid sequence than the first multimerizing region;
wherein the first and second multimerizing regions bind to a first ligand and the pro-apoptotic polypeptide regions are together capable of multimerizing following binding to the first ligand and inducing apoptosis in a cell.

18. The nucleic acid of claim 17, wherein the first multimerizing region binds to a second ligand that does not significantly bind to the second multimerizing region.

19. The nucleic acid of claim 18, wherein the second ligand is not capable of binding to the second multimerizing region.

20. The nucleic acid of claim 17, wherein the proapoptotic polypeptide is a caspase polypeptide.

21. A nucleic acid comprising a promoter operably linked to a polynucleotide coding for a polypeptide comprising a FRB or FRB variant region and a caspase polypeptide region.

22. The nucleic acid of claim 17, wherein
a) the first chimeric caspase polypeptide comprises a FRB or FRB variant region and a caspase polypeptide region; and
b) the second chimeric caspase polypeptide comprises an FKBP12 or FKBP12 variant region and a caspase polypeptide region.

23. A modified cell, transfected or transduced with a nucleic acid of claim 19.

24. A modified cell, comprising
a) a first polynucleotide encoding a first chimeric apoptotic polypeptide comprising a first multimerizing region and a pro-apoptotic polypeptide region and a second multimerizing region; and
b) a second polynucleotide encoding a second chimeric apoptotic polypeptide comprising a second multimerizing region and a pro-apoptotic polypeptide region, wherein the second multimerizing region has a different amino acid sequence than the first multimerizing region;
wherein the first and second multimerizing regions bind to a first ligand and the pro-apoptotic polypeptide regions are together capable of multimerizing following binding to the first ligand and inducing apoptosis in the cell.

25. The modified cell of claim 24, wherein the first multimerizing region binds to a second ligand that does not significantly bind to the second multimerizing region.

26. A nucleic acid comprising a promoter, operably linked to a polynucleotide encoding a first polypeptide, wherein the first polypeptide comprises a scaffold region comprising at least two first multimerizing regions or at least two second multimerizing regions, wherein each of the first multimerizing regions is different than each of the second multimerizing regions.

27. The nucleic acid of claim 26, further comprising a second polynucleotide encoding a second chimeric polypeptide, wherein the second chimeric polypeptide comprises a pro-apoptotic polypeptide region and the first multimerizing region or the second multimerizing region, wherein the second multimerizing region has a different amino acid sequence than the first multimerizing region; wherein:
the first multimerizing region and the second multimerizing region bind to a first ligand; and
the first polypeptide comprises the first multimerizing region and the second chimeric polypeptide comprises the second multimerizing region, or the first polypeptide comprises the second multimerizing region and the second chimeric polypeptide comprises the first multimerizing region.

28. The nucleic acid of claim 26, wherein:
the first ligand comprises a first portion,
the first multimerizing region binds to the first portion, and
the second multimerizing region does not significantly bind to the first portion.

29. The nucleic acid of claim 28, wherein the second multimerizing region binds to a second ligand, and the first multimerizing region does not significantly bind to the first multimerizing region.

30. A modified cell, comprising a polynucleotide encoding a first polypeptide, wherein the first polypeptide comprises a scaffold region comprising at least two first multimerizing regions or at least two second multimerizing regions, wherein each of the first multimerizing regions is different than each of the second multimerizing regions.

31. The modified cell of claim 30, further comprising a second polynucleotide encoding a second chimeric polypeptide, wherein the second chimeric polypeptide comprises a pro-apoptotic polypeptide region and the first multimerizing region or the second multimerizing region, wherein the second multimerizing region has a different amino acid sequence than the first multimerizing region; wherein:
the first multimerizing region and the second multimerizing region bind to a first ligand; and
the first polypeptide comprises the first multimerizing region and the second chimeric polypeptide comprises the second multimerizing region, or the first polypeptide comprises the second multimerizing region and the second chimeric polypeptide comprises the first multimerizing region.

32. The modified cell of claim 30, wherein the scaffold polypeptide, comprises at least two FRB or FRB variant regions, further comprising a second polynucleotide encoding a chimeric polypeptide comprising an FKBP12 or FKBP12 variant region and a Caspase-9 polypeptide.

33. The modified cell of claim 30, wherein the scaffold polypeptide comprises at least two FKBP12 or FKBP12 variant regions, further comprising a second polynucleotide encoding a chimeric polypeptide comprising a FRB or FRB variant and a Caspase-9 polypeptide.

34. The modified cell of claim 32, wherein the cell further comprises a chimeric antigen receptor.

35. A method of controlling survival of transplanted modified cells in a subject, comprising:
a) transplanting modified cells of claim 34 into the subject; and
b) after (a), administering to the subject rapamycin or a rapalog, in an amount effective to kill less than 30% of the modified cells that express the second chimeric polypeptide comprising the pro-apoptotic polypeptide region.

36. The method of claim 35, wherein the second multimerizing region is a FKBP12 or FKBP12 variant region, further comprising administering a ligand that binds to the FKBP12 or FKBP12 variant region on the second chimeric polypeptide comprising the pro-apoptotic polypeptide region in an amount effective to kill at least 90% of the modified cells that express the second chimeric polypeptide.

37. A method for treating a subject having a disease or condition associated with an elevated expression of a target antigen expressed by a target cell, comprising (a) administering to the subject an effective amount of a modified cell of claim 34, wherein the modified cell further comprises a polynucleotide coding for a chimeric antigen receptor or a T cell receptor that bind to the target antigen; and (b) after a), administering an effective amount of a ligand, rapamycin, or a rapalog.

38. The nucleic acid of claim 1, wherein,
a) the first chimeric polypeptide comprises (i) two FKBP12v36 regions; (ii) a truncated MyD88 polypeptide region lacking the TIR domain; and (iii) a CD40 cytoplasmic polypeptide region lacking the CD40 extracellular domain; and
b) the second chimeric polypeptide comprises a Caspase-9 region and a FRB_{L} region,
further comprising a third polynucleotide encoding a chimeric antigen receptor comprising a transmembrane region, a T cell activation molecule, and an antigen recognition moiety selected from the group consisting of Her2/Neu, PSCA, and CD19.

39. The modified cell of claim 10, wherein
a) the first chimeric polypeptide comprises (i) two FKBP12v36 regions; (ii) a truncated MyD88 polypeptide region lacking the TIR domain; and (iii) a CD40 cytoplasmic polypeptide region lacking the CD40 extracellular domain; and
b) the second chimeric polypeptide comprises a Caspase-9 region and a FRB_{L} region,
further comprising a third polynucleotide encoding a chimeric antigen receptor comprising a transmembrane region, a T cell activation molecule, and a Her2/Neu antigen recognition moiety.

40. The nucleic acid of claim 1, wherein
a) the first chimeric polypeptide comprises (i) two FKBP12v36 regions; (ii) a truncated MyD88 polypeptide region lacking the TIR domain; and (iii) a CD40 cytoplasmic polypeptide region lacking the CD40 extracellular domain; and
b) the second polynucleotide encoding a second chimeric polypeptide, wherein the second chimeric polypeptide comprises a Caspase-9 region and a FRB_{L}; region;
further comprising a third polynucleotide encoding a chimeric T cell receptor.

41. The modified cell, of claim 10, wherein,
a) the first chimeric polypeptide comprises (i) two FKBP12v36 regions; (ii) a truncated MyD88 polypeptide region lacking the TIR domain; and (iii) a CD40 cytoplasmic polypeptide region lacking the CD40 extracellular domain; and
b) the second chimeric polypeptide comprises a Caspase-9 region and a FRB_{L};
further comprising a third polynucleotide encoding a chimeric T cell receptor.

The application's sequence listing, which the Patent Office published only in electronic form, follows.

SEQUENCE LISTING (924 sequences)

SEQ ID NO: 1 - DNA, 590 bp, Artificial Sequence
  Description of Artificial Sequence: Synthetic polynucleotide
tgaaagaccccacctgtaggtttggcaagctagcttaagtaacgccattttgcaaggcatggaaaaatacataactgagaatagaaaagttcagatcaaggtcaggaacagatggaacagctgaatatgggccaaacaggatatctgtggtaagcagttcctgccccggctcagggccaagaacagatggaacagctgaatatgggccaaacaggatatctgtggtaagcagttcctgccccggctcagggccaagaacagatggtccccagatgcggtccagccctcagcagtttctagagaaccatcagatgtttccagggtgccccaaggacctgaaatgaccctgtgccttatttgaactaaccaatcagttcgcttctcgcttctgttcgcgcgcttatgctccccgagctcaataaaagagcccacaacccctcactcggggcgccagtcctccgattgactgagtcgcccgggtacccgtgtatccaataaaccctcttgcagttgcatccgacttgtggtctcgctgttccttgggagggtctcctctgagtgattgactacccgtcagcgggggtctttca

SEQ ID NO: 2 - DNA, 321 bp, Homo sapiens
ggagtgcaggtggaaaccatctccccaggagacgggcgcaccttccccaagcgcggccagacctgcgtggtgcactacaccgggatgcttgaagatggaaagaaagttgattcctcccgggacagaaacaagccctttaagtttatgctaggcaagcaggaggtgatccgaggctgggaagaaggggttgcccagatgagtgtgggtcagagagccaaactgactatatctccagattatgcctatggtgccactgggcacccaggcatcatcccaccacatgccactctcgtcttcgatgtggagcttctaaaactggaa

SEQ ID NO: 3 - protein, 107 aa, Homo sapiens
GVQVETISPGDGRTFPKRGQTCVVHYTGMLEDGKKVDSSRDRNKPFKFMLGKQEVIRGWEEGVAQMSVGQRAKLTISPDYAYGATGHPGIIPPHATLVFDVELLKLE

SEQ ID NO: 4 - DNA, 18 bp, Artificial Sequence
  Description of Artificial Sequence: Synthetic oligonucleotide
tctggcggtggatccgga

SEQ ID NO: 5 - protein, 6 aa, Artificial Sequence
  Description of Artificial Sequence: Synthetic peptide
SGGGSG

SEQ ID NO: 6 - DNA, 6 bp, Artificial Sequence
  Description of Artificial Sequence: Synthetic oligonucleotide
gtcgac

SEQ ID NO: 7 - protein, 2 aa, Artificial Sequence
  Description of Artificial Sequence: Synthetic peptide
VD

SEQ ID NO: 8 - DNA, 846 bp, Artificial Sequence
  Description of Artificial Sequence: Synthetic polynucleotide
ggatttggtgatgtcggtgctcttgagagtttgaggggaaatgcagatttggcttacatcctgagcatggagccctgtggccactgcctcattatcaacaatgtgaacttctgccgtgagtccgggctccgcacccgcactggctccaacatcgactgtgagaagttgcggcgtcgcttctcctcgctgcatttcatggtggaggtgaagggcgacctgactgccaagaaaatggtgctggctttgctggagctggcgcagcaggaccacggtgctctggactgctgcgtggtggtcattctctctcacggctgtcaggccagccacctgcagttcccaggggctgtctacggcacagatggatgccctgtgtcggtcgagaagattgtgaacatcttcaatgggaccagctgccccagcctgggagggaagcccaagctctttttcatccaggcctgtggtggggagcagaaagaccatgggtttgaggtggcctccacttcccctgaagacgagtcccctggcagtaaccccgagccagatgccaccccgttccaggaaggtttgaggaccttcgaccagctggacgccatatctagtttgcccacacccagtgacatctttgtgtcctactctactttcccaggttttgtttcctggagggaccccaagagtggctcctggtacgttgagaccctggacgacatctttgagcagtgggctcactctgaagacctgcagtccctcctgcttagggtcgctaatgctgtttcggtgaaagggatttataaacagatgcctggttgctttaatttcctccggaaaaaacttttctttaaaacatca

SEQ ID NO: 9 - protein, 282 aa, Artificial Sequence
  Description of Artificial Sequence: Synthetic polypeptide
GFGDVGALESLRGNADLAYILSMEPCGHCLIINNVNFCRESGLRTRTGSNIDCEKLRRRFSSLHFMVEVKGDLTAKKMVLALLELAQQDHGALDCCVVVILSHGCQASHLQFPGAVYGTDGCPVSVEKIVNIFNGTSCPSLGGKPKLFFIQACGGEQKDHGFEVASTSPEDESPGSNPEPDATPFQEGLRTFDQLDAISSLPTPSDIFVSYSTFPGFVSWRDPKSGSWYVETLDDIFEQWAHSEDLQSLLLRVANAVSVKGIYKQMPGCFNFLRKKLFFKTS

SEQ ID NO: 10 - DNA, 9 bp, Artificial Sequence
  Description of Artificial Sequence: Synthetic oligonucleotide
gctagcaga

SEQ ID NO: 11 - protein, 3 aa, Artificial Sequence
  Description of Artificial Sequence: Synthetic peptide
ASR

SEQ ID NO: 12 - DNA, 57 bp, Thosea asigna virus
gccgagggcaggggaagtcttctaacatgcggggacgtggaggaaaatcccgggccc

SEQ ID NO: 13 - protein, 19 aa, Thosea asigna virus
AEGRGSLLTCGDVEENPGP

SEQ ID NO: 14 - DNA, 999 bp, Homo sapiens
atgccacctcctcgcctcctcttcttcctcctcttcctcacccccatggaagtcaggcccgaggaacctctagtggtgaaggtggaagagggagataacgctgtgctgcagtgcctcaaggggacctcagatggccccactcagcagctgacctggtctcgggagtccccgcttaaacccttcttaaaactcagcctggggctgccaggcctgggaatccacatgaggcccctggccatctggcttttcatcttcaacgtctctcaacagatggggggcttctacctgtgccagccggggcccccctctgagaaggcctggcagcctggctggacagtcaatgtggagggcagcggggagctgttccggtggaatgtttcggacctaggtggcctgggctgtggcctgaagaacaggtcctcagagggccccagctccccttccgggaagctcatgagccccaagctgtatgtgtgggccaaagaccgccctgagatctgggagggagagcctccgtgtctcccaccgagggacagcctgaaccagagcctcagccaggacctcaccatggcccctggctccacactctggctgtcctgtggggtaccccctgactctgtgtccaggggccccctctcctggacccatgtgcaccccaaggggcctaagtcattgctgagcctagagctgaaggacgatcgcccggccagagatatgtgggtaatggagacgggtctgttgttgccccgggccacagctcaagacgctggaaagtattattgtcaccgtggcaacctgaccatgtcattccacctggagatcactgctcggccagtactatggcactggctgctgaggactggtggctggaaggtctcagctgtgactttggcttatctgatcttctgcctgtgttcccttgtgggcattcttcatcttcaaagagccctggtcctgaggaggaaaagaaagcgaatgactgaccccaccaggagattc

SEQ ID NO: 15 - protein, 333 aa, Homo sapiens
MPPPRLLFFLLFLTPMEVRPEEPLVVKVEEGDNAVLQCLKGTSDGPTQQLTWSRESPLKPFLKLSLGLPGLGIHMRPLAIWLFIFNVSQQMGGFYLCQPGPPSEKAWQPGWTVNVEGSGELFRWNVSDLGGLGCGLKNRSSEGPSSPSGKLMSPKLYVWAKDRPEIWEGEPPCLPPRDSLNQSLSQDLTMAPGSTLWLSCGVPPDSVSRGPLSWTHVHPKGPKSLLSLELKDDRPARDMWVMETGLLLPRATAQDAGKYYCHRGNLTMSFHLEITARPVLWHWLLRTGGWKVSAVTLAYLIFCLCSLVGILHLQRALVLRRKRKRMTDPTRRF

SEQ ID NO: 16 - DNA, 590 bp, Artificial Sequence
  Description of Artificial Sequence: Synthetic polynucleotide
tgaaagaccccacctgtaggtttggcaagctagcttaagtaacgccattttgcaaggcatggaaaaatacataactgagaatagagaagttcagatcaaggtcaggaacagatggaacagctgaatatgggccaaacaggatatctgtggtaagcagttcctgccccggctcagggccaagaacagatggaacagctgaatatgggccaaacaggatatctgtggtaagcagttcctgccccggctcagggccaagaacagatggtccccagatgcggtccagccctcagcagtttctagagaaccatcagatgtttccagggtgccccaaggacctgaaatgaccctgtgccttatttgaactaaccaatcagttcgcttctcgcttctgttcgcgcgcttctgctccccgagctcaataaaagagcccacaacccctcactcggggcgccagtcctccgattgactgagtcgcccgggtacccgtgtatccaataaaccctcttgcagttgcatccgacttgtggtctcgctgttccttgggagggtctcctctgagtgattgactacccgtcagcgggggtctttca

SEQ ID NO: 17 - DNA, 8622 bp, Artificial Sequence
  Description of Artificial Sequence: Synthetic polynucleotide
tgaaagaccccacctgtaggtttggcaagctagcttaagtaacgccattttgcaaggcatggaaaaatacataactgagaatagaaaagttcagatcaaggtcaggaacagatggaacagctgaatatgggccaaacaggatatctgtggtaagcagttcctgccccggctcagggccaagaacagatggaacagctgaatatgggccaaacaggatatctgtggtaagcagttcctgccccggctcagggccaagaacagatggtccccagatgcggtccagccctcagcagtttctagagaaccatcagatgtttccagggtgccccaaggacctgaaatgaccctgtgccttatttgaactaaccaatcagttcgcttctcgcttctgttcgcgcgcttatgctccccgagctcaataaaagagcccacaacccctcactcggggcgccagtcctccgattgactgagtcgcccgggtacccgtgtatccaataaaccctcttgcagttgcatccgacttgtggtctcgctgttccttgggagggtctcctctgagtgattgactacccgtcagcgggggtctttcatttgggggctcgtccgggatcgggagacccctgcccagggaccaccgacccaccaccgggaggtaagctggccagcaacttatctgtgtctgtccgattgtctagtgtctatgactgattttatgcgcctgcgtcggtactagttagctaactagctctgtatctggcggacccgtggtggaactgacgagttcggaacacccggccgcaaccctgggagacgtcccagggacttcgggggccgtttttgtggcccgacctgagtcctaaaatcccgatcgtttaggactctttggtgcaccccccttagaggagggatatgtggttctggtaggagacgagaacctaaaacagttcccgcctccgtctgaatttttgctttcggtttgggaccgaagccgcgccgcgcgtcttgtctgctgcagcatcgttctgtgttgtctctgtctgactgtgtttctgtatttgtctgaaaatatgggcccgggctagcctgttaccactcccttaagtttgaccttaggtcactggaaagatgtcgagcggatcgctcacaaccagtcggtagatgtcaagaagagacgttgggttaccttctgctctgcagaatggccaacctttaacgtcggatggccgcgagacggcacctttaaccgagacctcatcacccaggttaagatcaaggtcttttcacctggcccgcatggacacccagaccaggtggggtacatcgtgacctgggaagccttggcttttgacccccctccctgggtcaagccctttgtacaccctaagcctccgcctcctcttcctccatccgccccgtctctcccccttgaacctcctcgttcgaccccgcctcgatcctccctttatccagccctcactccttctctaggcgcccccatatggccatatgagatcttatatggggcacccccgccccttgtaaacttccctgaccctgacatgacaagagttactaacagcccctctctccaagctcacttacaggctctctacttagtccagcacgaagtctggagacctctggcggcagcctaccaagaacaactggaccgaccggtggtacctcacccttaccgagtcggcgacacagtgtgggtccgccgacaccagactaagaacctagaacctcgctggaaaggaccttacacagtcctgctgaccacccccaccgccctcaaagtagacggcatcgcagcttggatacacgccgcccacgtgaaggctgccgaccccgggggtggaccatcctctagactgccatgctcgagggagtgcaggtggaaaccatctccccaggagacgggcgcaccttccccaagcgcggccagacctgcgtggtgcactacaccgggatgcttgaagatggaaagaaagttgattcctcccgggacagaaacaagccctttaagtttatgctaggcaagcaggaggtgatccgaggctgggaagaaggggttgcccagatgagtgtgggtcagagagccaaactgactatatctccagattatgcctatggtgccactgggcacccaggcatcatcccaccacatgccactctcgtcttcgatgtggagcttctaaaactggaatctggcggtggatccggagtcgacggatttggtgatgtcggtgctcttgagagtttgaggggaaatgcagatttggcttacatcctgagcatggagccctgtggccactgcctcattatcaacaatgtgaacttctgccgtgagtccgggctccgcacccgcactggctccaacatcgactgtgagaagttgcggcgtcgcttctcctcgctgcatttcatggtggaggtgaagggcgacctgactgccaagaaaatggtgctggctttgctggagctggcgcagcaggaccacggtgctctggactgctgcgtggtggtcattctctctcacggctgtcaggccagccacctgcagttcccaggggctgtctacggcacagatggatgccctgtgtcggtcgagaagattgtgaacatcttcaatgggaccagctgccccagcctgggagggaagcccaagctctttttcatccaggcctgtggtggggagcagaaagaccatgggtttgaggtggcctccacttcccctgaagacgagtcccctggcagtaaccccgagccagatgccaccccgttccaggaaggtttgaggaccttcgaccagctggacgccatatctagtttgcccacacccagtgacatctttgtgtcctactctactttcccaggttttgtttcctggagggaccccaagagtggctcctggtacgttgagaccctggacgacatctttgagcagtgggctcactctgaagacctgcagtccctcctgcttagggtcgctaatgctgtttcggtgaaagggatttataaacagatgcctggttgctttaatttcctccggaaaaaacttttctttaaaacatcagctagcagagccgagggcaggggaagtcttctaacatgcggggacgtggaggaaaatcccgggcccatgccacctcctcgcctcctcttcttcctcctcttcctcacccccatggaagtcaggcccgaggaacctctagtggtgaaggtggaagagggagataacgctgtgctgcagtgcctcaaggggacctcagatggccccactcagcagctgacctggtctcgggagtccccgcttaaacccttcttaaaactcagcctggggctgccaggcctgggaatccacatgaggcccctggccatctggcttttcatcttcaacgtctctcaacagatggggggcttctacctgtgccagccggggcccccctctgagaaggcctggcagcctggctggacagtcaatgtggagggcagcggggagctgttccggtggaatgtttcggacctaggtggcctgggctgtggcctgaagaacaggtcctcagagggccccagctccccttccgggaagctcatgagccccaagctgtatgtgtgggccaaagaccgccctgagatctgggagggagagcctccgtgtctcccaccgagggacagcctgaaccagagcctcagccaggacctcaccatggcccctggctccacactctggctgtcctgtggggtaccccctgactctgtgtccaggggccccctctcctggacccatgtgcaccccaaggggcctaagtcattgctgagcctagagctgaaggacgatcgcccggccagagatatgtgggtaatggagacgggtctgttgttgccccgggccacagctcaagacgctggaaagtattattgtcaccgtggcaacctgaccatgtcattccacctggagatcactgctcggccagtactatggcactggctgctgaggactggtggctggaaggtctcagctgtgactttggcttatctgatcttctgcctgtgttcccttgtgggcattcttcatcttcaaagagccctggtcctgaggaggaaaagaaagcgaatgactgaccccaccaggagattctaacgcgtcatcatcgatccggattagtccaatttgttaaagacaggatatcagtggtccaggctctagttttgactcaacaatatcaccagctgaagcctatagagtacgagccatagataaaataaaagattttatttagtctccagaaaaaggggggaatgaaagaccccacctgtaggtttggcaagctagcttaagtaacgccattttgcaaggcatggaaaaatacataactgagaatagagaagttcagatcaaggtcaggaacagatggaacagctgaatatgggccaaacaggatatctgtggtaagcagttcctgccccggctcagggccaagaacagatggaacagctgaatatgggccaaacaggatatctgtggtaagcagttcctgccccggctcagggccaagaacagatggtccccagatgcggtccagccctcagcagtttctagagaaccatcagatgtttccagggtgccccaaggacctgaaatgaccctgtgccttatttgaactaaccaatcagttcgcttctcgcttctgttcgcgcgcttctgctccccgagctcaataaaagagcccacaacccctcactcggggcgccagtcctccgattgactgagtcgcccgggtacccgtgtatccaataaaccctcttgcagttgcatccgacttgtggtctcgctgttccttgggagggtctcctctgagtgattgactacccgtcagcgggggtctttcacacatgcagcatgtatcaaaattaatttggttttttttcttaagtatttacattaaatggccatagtacttaaagttacattggcttccttgaaataaacatggagtattcagaatgtgtcataaatatttctaattttaagatagtatctccattggctttctactttttcttttatttttttttgtcctctgtcttccatttgttgttgttgttgtttgtttgtttgtttgttggttggttggttaatttttttttaaagatcctacactatagttcaagctagactattagctactctgtaacccagggtgaccttgaagtcatgggtagcctgctgttttagccttcccacatctaagattacaggtatgagctatcatttttggtatattgattgattgattgattgatgtgtgtgtgtgtgattgtgtttgtgtgtgtgactgtgaaaatgtgtgtatgggtgtgtgtgaatgtgtgtatgtatgtgtgtgtgtgagtgtgtgtgtgtgtgtgtgcatgtgtgtgtgtgtgactgtgtctatgtgtatgactgtgtgtgtgtgtgtgtgtgtgtgtgtgtgtgtgtgtgtgtgtgtgttgtgaaaaaatattctatggtagtgagagccaacgctccggctcaggtgtcaggttggtttttgagacagagtctttcacttagcttggaattcactggccgtcgttttacaacgtcgtgactgggaaaaccctggcgttacccaacttaatcgccttgcagcacatccccctttcgccagctggcgtaatagcgaagaggcccgcaccgatcgcccttcccaacagttgcgcagcctgaatggcgaatggcgcctgatgcggtattttctccttacgcatctgtgcggtatttcacaccgcatatggtgcactctcagtacaatctgctctgatgccgcatagttaagccagccccgacacccgccaacacccgctgacgcgccctgacgggcttgtctgctcccggcatccgcttacagacaagctgtgaccgtctccgggagctgcatgtgtcagaggttttcaccgtcatcaccgaaacgcgcgatgacgaaagggcctcgtgatacgcctatttttataggttaatgtcatgataataatggtttcttagacgtcaggtggcacttttcggggaaatgtgcgcggaacccctatttgtttatttttctaaatacattcaaatatgtatccgctcatgagacaataaccctgataaatgcttcaataatattgaaaaaggaagagtatgagtattcaacatttccgtgtcgcccttattcccttttttgcggcattttgccttcctgtttttgctcacccagaaacgctggtgaaagtaaaagatgctgaagatcagttgggtgcacgagtgggttacatcgaactggatctcaacagcggtaagatccttgagagttttcgccccgaagaacgttttccaatgatgagcacttttaaagttctgctatgtggcgcggtattatcccgtattgacgccgggcaagagcaactcggtcgccgcatacactattctcagaatgacttggttgagtactcaccagtcacagaaaagcatcttacggatggcatgacagtaagagaattatgcagtgctgccataaccatgagtgataacactgcggccaacttacttctgacaacgatcggaggaccgaaggagctaaccgcttttttgcacaacatgggggatcatgtaactcgccttgatcgttgggaaccggagctgaatgaagccataccaaacgacgagcgtgacaccacgatgcctgtagcaatggcaacaacgttgcgcaaactattaactggcgaactacttactctagcttcccggcaacaattaatagactggatggaggcggataaagttgcaggaccacttctgcgctcggcccttccggctggctggtttattgctgataaatctggagccggtgagcgtgggtctcgcggtatcattgcagcactggggccagatggtaagccctcccgtatcgtagttatctacacgacggggagtcaggcaactatggatgaacgaaatagacagatcgctgagataggtgcctcactgattaagcattggtaactgtcagaccaagtttactcatatatactttagattgatttaaaacttcatttttaatttaaaaggatctaggtgaagatcctttttgataatctcatgaccaaaatcccttaacgtgagttttcgttccactgagcgtcagaccccgtagaaaagatcaaaggatcttcttgagatcctttttttctgcgcgtaatctgctgcttgcaaacaaaaaaaccaccgctaccagcggtggtttgtttgccggatcaagagctaccaactctttttccgaaggtaactggcttcagcagagcgcagataccaaatactgtccttctagtgtagccgtagttaggccaccacttcaagaactctgtagcaccgcctacatacctcgctctgctaatcctgttaccagtggctgctgccagtggcgataagtcgtgtcttaccgggttggactcaagacgatagttaccggataaggcgcagcggtcgggctgaacggggggttcgtgcacacagcccagcttggagcgaacgacctacaccgaactgagatacctacagcgtgagcattgagaaagcgccacgcttcccgaagggagaaaggcggacaggtatccggtaagcggcagggtcggaacaggagagcgcacgagggagcttccagggggaaacgcctggtatctttatagtcctgtcgggtttcgccacctctgacttgagcgtcgatttttgtgatgctcgtcaggggggcggagcctatggaaaaacgccagcaacgcggcctttttacggttcctggccttttgctggccttttgctcacatgttctttcctgcgttatcccctgattctgtggataaccgtattaccgcctttgagtgagctgataccgctcgccgcagccgaacgaccgagcgcagcgagtcagtgagcgaggaagcggaagagcgcccaatacgcaaaccgcctctccccgcgcgttggccgattcattaatgcagctggcacgacaggtttcccgactggaaagcgggcagtgagcgcaacgcaattaatgtgagttagctcactcattaggcaccccaggctttacactttatgcttccggctcgtatgttgtgtggaattgtgagcggataacaatttcacacaggaaacagctatgaccatgattacgccaagctttgctcttaggagtttcctaatacatcccaaactcaaatatataaagcatttgacttgttctatgccctagggggcggggggaagctaagccagctttttttaacatttaaaatgttaattccattttaaatgcacagatgtttttatttcataagggtttcaatgtgcatgaatgctgcaatattcctgttaccaaagctagtataaataaaaatagataaacgtggaaattacttagagtttctgtcattaacgtttccttcctcagttgacaacataaatgcgctgctgagcaagccagtttgcatctgtcaggatcaatttcccattatgccagtcatattaattactagtcaattagttgatttttatttttgacatatacatgtgaa

SEQ ID NO: 18 - DNA, 678 bp, Artificial Sequence
  Description of Artificial Sequence: Synthetic polynucleotide
ctcgagggcgtccaagtcgaaaccattagtcccggcgatggcagaacatttcctaaaaggggacaaacatgtgtcgtccattatacaggcatgttggaggacggcaaaaaggtggacagtagtagagatcgcaataaacctttcaaattcatgttgggaaaacaagaagtcattaggggatgggaggagggcgtggctcaaatgtccgtcggccaacgcgctaagctcaccatcagccccgactacgcatacggcgctaccggacatcccggaattattccccctcacgctaccttggtgtttgacgtcgaactgttgaagctcgaagtcgagggagtgcaggtggaaaccatctccccaggagacgggcgcaccttccccaagcgcggccagacctgcgtggtgcactacaccgggatgcttgaagatggaaagaaagttgattcctcccgggacagaaacaagccctttaagtttatgctaggcaagcaggaggtgatccgaggctgggaagaaggggttgcccagatgagtgtgggtcagagagccaaactgactatatctccagattatgcctatggtgccactgggcacccaggcatcatcccaccacatgccactctcgtcttcgatgtggagcttctaaaactggaatctggcggtggatccggagtcgag

SEQ ID NO: 19 - protein, 222 aa, Artificial Sequence
  Description of Artificial Sequence: Synthetic polypeptide
GVQVETISPGDGRTFPKRGQTCVVHYTGMLEDGKKVDSSRDRNKPFKFMLGKQEVIRGWEEGVAQMSVGQRAKLTISPDYAYGATGHPGIIPPHATLVFDVELLKLEVEGVQVETISPGDGRTFPKRGQTCVVHYTGMLEDGKKVDSSRDRNKPFKFMLGKQEVIRGWEEGVAQMSVGQRAKLTISPDYAYGATGHPGIIPPHATLVFDVELLKLESGGGSG

SEQ ID NO: 20 - DNA, 1200 bp, Artificial Sequence
  Description of Artificial Sequence: Synthetic polynucleotide
atgctcgagggagtgcaggtggagactatctccccaggagacgggcgcaccttccccaagcgcggccagacctgcgtggtgcactacaccgggatgcttgaagatggaaagaaagttgattcctcccgggacagaaacaagccctttaagtttatgctaggcaagcaggaggtgatccgaggctgggaagaaggggttgcccagatgagtgtgggtcagagagccaaactgactatatctccagattatgcctatggtgccactgggcacccaggcatcatcccaccacatgccactctcgtcttcgatgtggagcttctaaaactggaatctggcggtggatccggagtcgacggatttggtgatgtcggtgctcttgagagtttgaggggaaatgcagatttggcttacatcctgagcatggagccctgtggccactgcctcattatcaacaatgtgaacttctgccgtgagtccgggctccgcacccgcactggctccaacatcgactgtgagaagttgcggcgtcgcttctcctcgctgcatttcatggtggaggtgaagggcgacctgactgccaagaaaatggtgctggctttgctggagctggcgcggcaggaccacggtgctctggactgctgcgtggtggtcattctctctcacggctgtcaggccagccacctgcagttcccaggggctgtctacggcacagatggatgccctgtgtcggtcgagaagattgtgaacatcttcaatgggaccagctgccccagcctgggagggaagcccaagctctttttcatccaggcctgtggtggggagcagaaagaccatgggtttgaggtggcctccacttcccctgaagacgagtcccctggcagtaaccccgagccagatgccaccccgttccaggaaggtttgaggaccttcgaccagctggacgccatatctagtttgcccacacccagtgacatctttgtgtcctactctactttcccaggttttgtttcctggagggaccccaagagtggctcctggtacgttgagaccctggacgacatctttgagcagtgggctcactctgaagacctgcagtccctcctgcttagggtcgctaatgctgtttcggtgaaagggatttataaacagatgcctggttgctttaatttcctccggaaaaaacttttctttaaaacatca

SEQ ID NO: 21 - protein, 107 aa, Artificial Sequence; identical to SEQ ID NO: 3
  Description of Artificial Sequence: Synthetic polypeptide

SEQ ID NO: 22 - protein, 282 aa, Artificial Sequence
  Description of Artificial Sequence: Synthetic polypeptide
GFGDVGALESLRGNADLAYILSMEPCGHCLIINNVNFCRESGLRTRTGSNIDCEKLRRRFSSLHFMVEVKGDLTAKKMVLALLELARQDHGALDCCVVVILSHGCQASHLQFPGAVYGTDGCPVSVEKIVNIFNGTSCPSLGGKPKLFFIQACGGEQKDHGFEVASTSPEDESPGSNPEPDATPFQEGLRTFDQLDAISSLPTPSDIFVSYSTFPGFVSWRDPKSGSWYVETLDDIFEQWAHSEDLQSLLLRVANAVSVKGIYKQMPGCFNFLRKKLFFKTS

SEQ ID NO: 23 - DNA, 846 bp, Artificial Sequence
  Description of Artificial Sequence: Synthetic polynucleotide
ggatttggtgatgtcggtgctcttgagagtttgaggggaaatgcagatttggcttacatcctgagcatggagccctgtggccactgcctcattatcaacaatgtgaacttctgccgtgagtccgggctccgcacccgcactggctccaacatcgactgtgagaagttgcggcgtcgcttctcctcgctgcatttcatggtggaggtgaagggcgacctgactgccaagaaaatggtgctggctttgctggagctggcgcggcaggaccacggtgctctggactgctgcgtggtggtcattctctctcacggctgtcaggccagccacctgcagttcccaggggctgtctacggcacagatggatgccctgtgtcggtcgagaagattgtgaacatcttcaatgggaccagctgccccagcctgggagggaagcccaagctctttttcatccaggcctgtggtggggagcagaaagaccatgggtttgaggtggcctccacttcccctgaagacgagtcccctggcagtaaccccgagccagatgccaccccgttccaggaaggtttgaggaccttcgaccagctggccgccatatctagtttgcccacacccagtgacatctttgtgtcctactctactttcccaggttttgtttcctggagggaccccaagagtggctcctggtacgttgagaccctggacgacatctttgagcagtgggctcactctgaagacctgcagtccctcctgcttagggtcgctaatgctgtttcggtgaaagggatttataaacagatgcctggttgctttaatttcctccggaaaaaacttttctttaaaacatca

SEQ ID NO: 24 - protein, 282 aa, Artificial Sequence
  Description of Artificial Sequence: Synthetic polypeptide
GFGDVGALESLRGNADLAYILSMEPCGHCLIINNVNFCRESGLRTRTGSNIDCEKLRRRFSSLHFMVEVKGDLTAKKMVLALLELARQDHGALDCCVVVILSHGCQASHLQFPGAVYGTDGCPVSVEKIVNIFNGTSCPSLGGKPKLFFIQACGGEQKDHGFEVASTSPEDESPGSNPEPDATPFQEGLRTFDQLAAISSLPTPSDIFVSYSTFPGFVSWRDPKSGSWYVETLDDIFEQWAHSEDLQSLLLRVANAVSVKGIYKQMPGCFNFLRKKLFFKTS

SEQ ID NO: 25 - DNA, 846 bp, Artificial Sequence
  Description of Artificial Sequence: Synthetic polynucleotide
ggatttggtgatgtcggtgctcttgagagtttgaggggaaatgcagatttggcttacatcctgagcatggagccctgtggccactgcctcattatcaacaatgtgaacttctgccgtgagtccgggctccgcacccgcactggctccaacatcgactgtgagaagttgcggcgtcgcttctcctcgctgcatttcatggtggaggtgaagggcgacctgactgccaagaaaatggtgctggctttgctggagctggcgcggcaggaccacggtgctctggactgctgcgtggtggtcattctctctcacggctgtcaggccagccacctgcagttcccaggggctgtctacggcacagatggatgccctgtgtcggtcgagaagattgtgaacatcttcaatgggaccagctgccccagcctgggagggaagcccaagctctttttcatccaggcctgtggtggggagcagaaagaccatgggtttgaggtggcctccacttcccctgaagacgagtcccctggcagtaaccccgagccagatgccaccccgttccaggaaggtttgaggaccttcgaccagctggacgccatatctagtttgcccacacccagtgacatctttgtgtcctactctactttcccaggttttgtttcctggagggaccccaagagtggctcctggtacgttgagaccctggacgacatctttgagcagtgggctcactctgaagacctgcagtccctcctgcttagggtcgctaatgctgtttcggtgaaagggatttataaacagatgcctggttgctttcagttcctccggaaaaaacttttctttaaaacatca

SEQ ID NO: 26 - protein, 282 aa, Artificial Sequence
  Description of Artificial Sequence: Synthetic polypeptide
GFGDVGALESLRGNADLAYILSMEPCGHCLIINNVNFCRESGLRTRTGSNIDCEKLRRRFSSLHFMVEVKGDLTAKKMVLALLELARQDHGALDCCVVVILSHGCQASHLQFPGAVYGTDGCPVSVEKIVNIFNGTSCPSLGGKPKLFFIQACGGEQKDHGFEVASTSPEDESPGSNPEPDATPFQEGLRTFDQLDAISSLPTPSDIFVSYSTFPGFVSWRDPKSGSWYVETLDDIFEQWAHSEDLQSLLLRVANAVSVKGIYKQMPGCFQFLRKKLFFKTS

SEQ ID NO: 27 - DNA, 846 bp, Artificial Sequence
  Description of Artificial Sequence: Synthetic polynucleotide
ggatttggtgatgtcggtgctcttgagagtttgaggggaaatgcagatttggcttacatcctgagcatggagccctgtggccactgcctcattatcaacaatgtgaacttctgccgtgagtccgggctccgcacccgcactggctccaacatcgactgtgagaagttgcggcgtcgcttctcctcgctgcatttcatggtggaggtgaagggcgacctgactgccaagaaaatggtgctggctttgctggagctggcgcggcaggaccacggtgctctggactgctgcgtggtggtcattctctctcacggctgtcaggccagccacctgcagttcccaggggctgtctacggcacagatggatgccctgtgtcggtcgagaagattgtgaacatcttcaatgggaccagctgccccagcctgggagggaagcccaagctctttttcatccaggcctgtggtggggagcagaaagaccatgggtttgaggtggcctccacttcccctgaagacgagtcccctggcagtaaccccgagccagatgccaccccgttccaggaaggtttgaggaccttcgaccagctggccgccatatctagtttgcccacacccagtgacatctttgtgtcctactctactttcccaggttttgtttcctggagggaccccaagagtggctcctggtacgttgagaccctggacgacatctttgagcagtgggctcactctgaagacctgcagtccctcctgcttagggtcgctaatgctgtttcggtgaaagggatttataaacagatgcctggttgctttcagttcctccggaaaaaacttttctttaaaacatca

SEQ ID NO: 28 - protein, 282 aa, Artificial Sequence
  Description of Artificial Sequence: Synthetic polypeptide
GFGDVGALESLRGNADLAYILSMEPCGHCLIINNVNFCRESGLRTRTGSNIDCEKLRRRFSSLHFMVEVKGDLTAKKMVLALLELARQDHGALDCCVVVILSHGCQASHLQFPGAVYGTDGCPVSVEKIVNIFNGTSCPSLGGKPKLFFIQACGGEQKDHGFEVASTSPEDESPGSNPEPDATPFQEGLRTFDQLAAISSLPTPSDIFVSYSTFPGFVSWRDPKSGSWYVETLDDIFEQWAHSEDLQSLLLRVANAVSVKGIYKQMPGCFQFLRKKLFFKTS

SEQ ID NO: 29 - DNA, 321 bp, Artificial Sequence
  Description of Artificial Sequence: Synthetic polynucleotide
ggcgttcaagtagaaacaatcagcccaggagacggaaggactttccccaaacgaggccaaacatgcgtagttcattatactgggatgctcgaagatggaaaaaaagtagatagtagtagagaccgaaacaaaccatttaaatttatgttgggaaaacaagaagtaataaggggctgggaagaaggtgtagcacaaatgtctgttggccagcgcgcaaaactcacaatttctcctgattatgcttacggagctaccggccaccccggcatcataccccctcatgccacactggtgtttgacgtcgaattgctcaaactggaa

SEQ ID NO: 30 - protein, 107 aa, Artificial Sequence; identical to SEQ ID NO: 3
  Description of Artificial Sequence: Synthetic polypeptide

SEQ ID NO: 31 - DNA, 321 bp, Artificial Sequence
  Description of Artificial Sequence: Synthetic polynucleotide
ggagtgcaggtggagacgattagtcctggggatgggagaacctttccaaagcgcggtcagacctgtgttgtccactacaccggtatgctggaggacgggaagaaggtggactcttcacgcgatcgcaataagcctttcaagttcatgctcggcaagcaggaggtgatccgggggtgggaggagggcgtggctcagatgtcggtcgggcaacgagcgaagcttaccatctcacccgactacgcgtatggggcaacggggcatccgggaattatccctccccacgctacgctcgtattcgatgtggagctcttgaagcttgag

SEQ ID NO: 32 - protein, 107 aa, Artificial Sequence; identical to SEQ ID NO: 3
  Description of Artificial Sequence: Synthetic polypeptide

SEQ ID NO: 33 - DNA, 1002 bp, Artificial Sequence
  Description of Artificial Sequence: Synthetic polynucleotide
atgccccctcctagactgctgtttttcctgctctttctcaccccaatggaagttagacctgaggaaccactggtcgttaaagtggaagaaggtgataatgctgtcctccaatgccttaaagggaccagcgacggaccaacgcagcaactgacttggagccgggagtcccctctcaagccgtttctcaagctgtcacttggcctgccaggtcttggtattcacatgcgcccccttgccatttggctcttcatattcaatgtgtctcaacaaatgggtggattctacctttgccagcccggccccccttctgagaaagcttggcagcctggatggaccgtcaatgttgaaggctccggtgagctgtttagatggaatgtgagcgaccttggcggactcggttgcggactgaaaaataggagctctgaaggaccctcttctccctccggtaagttgatgtcacctaagctgtacgtgtgggccaaggaccgccccgaaatctgggagggcgagcctccatgcctgccgcctcgcgattcactgaaccagtctctgtcccaggatctcactatggcgcccggatctactctttggctgtcttgcggcgttcccccagatagcgtgtcaagaggacctctgagctggacccacgtacaccctaagggccctaagagcttgttgagcctggaactgaaggacgacagacccgcacgcgatatgtgggtaatggagaccggccttctgctccctcgcgctaccgcacaggatgcagggaaatactactgtcatagagggaatctgactatgagctttcatctcgaaattacagcacggcccgttctttggcattggctcctccggactggaggctggaaggtgtctgccgtaacactcgcttacttgattttttgcctgtgtagcctggttgggatcctgcatcttcagcgagcccttgtattgcgccgaaaaagaaaacgaatgactgaccctacacgacgattctga

SEQ ID NO: 34 - protein, 333 aa, Artificial Sequence; identical to SEQ ID NO: 15
  Description of Artificial Sequence: Synthetic polypeptide

SEQ ID NO: 35 - DNA, 330 bp, Artificial Sequence
  Description of Artificial Sequence: Synthetic polynucleotide
atgctggagggagtgcaggtggagactattagccccggagatggcagaacattccccaaaagaggacagacttgcgtcgtgcattatactggaatgctggaagacggcaagaaggtggacagcagccgggaccgaaacaagcccttcaagttcatgctggggaagcaggaagtgatccggggctgggaggaaggagtcgcacagatgtcagtgggacagagggccaaactgactattagcccagactacgcttatggagcaaccggccaccccgggatcattccccctcatgctacactggtcttcgatgtggagctgctgaagctggaa

SEQ ID NO: 36 - protein, 110 aa, Artificial Sequence
  Description of Artificial Sequence: Synthetic polypeptide
MLEGVQVETISPGDGRTFPKRGQTCVVHYTGMLEDGKKVDSSRDRNKPFKFMLGKQEVIRGWEEGVAQMSVGQRAKLTISPDYAYGATGHPGIIPPHATLVFDVELLKLE

SEQ ID NO: 37 - DNA, 18 bp, Artificial Sequence
  Description of Artificial Sequence: Synthetic oligonucleotide
agcggaggaggatccgga

SEQ ID NO: 38 - protein, 6 aa, Artificial Sequence
  Description of Artificial Sequence: Synthetic peptide
SGGGSG

SEQ ID NO: 39 - DNA, 864 bp, Artificial Sequence
  Description of Artificial Sequence: Synthetic polynucleotide
gtggacgggtttggagatgtgggagccctggaatccctgcggggcaatgccgatctggcttacatcctgtctatggagccttgcggccactgtctgatcattaacaatgtgaacttctgcagagagagcgggctgcggaccagaacaggatccaatattgactgtgaaaagctgcggagaaggttctctagtctgcactttatggtcgaggtgaaaggcgatctgaccgctaagaaaatggtgctggccctgctggaactggctcggcaggaccatggggcactggattgctgcgtggtcgtgatcctgagtcacggctgccaggcttcacatctgcagttccctggggcagtctatggaactgacggctgtccagtcagcgtggagaagatcgtgaacatcttcaacggcacctcttgcccaagtctgggcgggaagcccaaactgttctttattcaggcctgtggaggcgagcagaaagatcacggcttcgaagtggctagcacctcccccgaggacgaatcacctggaagcaaccctgagccagatgcaacccccttccaggaaggcctgaggacatttgaccagctggatgccatctcaagcctgcccacaccttctgacattttcgtctcttacagtactttccctggatttgtgagctggcgcgatccaaagtcaggcagctggtacgtggagacactggacgatatctttgagcagtgggcccattctgaagacctgcagagtctgctgctgcgagtggccaatgctgtctctgtgaaggggatctacaaacagatgccaggatgcttccagtttctgagaaagaaactgttctttaagacctccgcatctagggcc

SEQ ID NO: 40 - protein, 288 aa, Artificial Sequence
  Description of Artificial Sequence: Synthetic polypeptide
VDGFGDVGALESLRGNADLAYILSMEPCGHCLIINNVNFCRESGLRTRTGSNIDCEKLRRRFSSLHFMVEVKGDLTAKKMVLALLELARQDHGALDCCVVVILSHGCQASHLQFPGAVYGTDGCPVSVEKIVNIFNGTSCPSLGGKPKLFFIQACGGEQKDHGFEVASTSPEDESPGSNPEPDATPFQEGLRTFDQLDAISSLPTPSDIFVSYSTFPGFVSWRDPKSGSWYVETLDDIFEQWAHSEDLQSLLLRVANAVSVKGIYKQMPGCFQFLRKKLFFKTSASRA

SEQ ID NO: 41 - DNA, 6 bp, Artificial Sequence
  Description of Artificial Sequence: Synthetic oligonucleotide
ccgcgg

SEQ ID NO: 42 - protein, 2 aa, Artificial Sequence
  Description of Artificial Sequence: Synthetic peptide
PR

SEQ ID NO: 43 - protein, 18 aa, Artificial Sequence
  Description of Artificial Sequence: Synthetic peptide
EGRGSLLTCGDVEENPGP

SEQ ID NO: 44 - DNA, 864 bp, Artificial Sequence
  Description of Artificial Sequence: Synthetic polynucleotide
gtcgacggatttggtgatgtcggtgctcttgagagtttgaggggaaatgcagatttggcttacatcctgagcatggagccctgtggccactgcctcattatcaacaatgtgaacttctgccgtgagtccgggctccgcacccgcactggctccaacatcgactgtgagaagttgcggcgtcgcttctcctcgctgcatttcatggtggaggtgaagggcgacctgactgccaagaaaatggtgctggctttgctggagctggcgcggcaggaccacggtgctctggactgctgcgtggtggtcattctctctcacggctgtcaggccagccacctgcagttcccaggggctgtctacggcacagatggatgccctgtgtcggtcgagaagattgtgaacatcttcaatgggaccagctgccccagcctgggagggaagcccaagctctttttcatccaggcctgtggtggggagcagaaagaccatgggtttgaggtggcctccacttcccctgaagacgagtcccctggcagtaaccccgagccagatgccaccccgttccaggaaggtttgaggaccttcgaccagctggacgccatatctagtttgcccacacccagtgacatctttgtgtcctactctactttcccaggttttgtttcctggagggaccccaagagtggctcctggtacgttgagaccctggacgacatctttgagcagtgggctcactctgaagacctgcagtccctcctgcttagggtcgctaatgctgtttcggtgaaagggatttataaacagatgcctggttgctttaatttcctccggaaaaaacttttctttaaaacatcagctagcagagcc

SEQ ID NO: 45 - protein, 288 aa, Artificial Sequence
  Description of Artificial Sequence: Synthetic polypeptide
VDGFGDVGALESLRGNADLAYILSMEPCGHCLIINNVNFCRESGLRTRTGSNIDCEKLRRRFSSLHFMVEVKGDLTAKKMVLALLELARQDHGALDCCVVVILSHGCQASHLQFPGAVYGTDGCPVSVEKIVNIFNGTSCPSLGGKPKLFFIQACGGEQKDHGFEVASTSPEDESPGSNPEPDATPFQEGLRTFDQLDAISSLPTPSDIFVSYSTFPGFVSWRDPKSGSWYVETLDDIFEQWAHSEDLQSLLLRVANAVSVKGIYKQMPGCFNFLRKKLFFKTSASRA

SEQ ID NO: 46 - DNA, 864 bp, Artificial Sequence
  Description of Artificial Sequence: Synthetic polynucleotide
gtggacgggtttggagatgtgggagccctggaatccctgcggggcaatgccgatctggcttacatcctgtctatggagccttgcggccactgtctgatcattaacaatgtgaacttctgcagagagagcgggctgcggaccagaacaggatccaatattgactgtgaaaagctgcggagaaggttctctagtctgcactttatggtcgaggtgaaaggcgatctgaccgctaagaaaatggtgctggccctgctggaactggctcggcaggaccatggggcactggattgctgcgtggtcgtgatcctgagtcacggctgccaggcttcacatctgcagttccctggggcagtctatggaactgacggctgtccagtcagcgtggagaagatcgtgaacatcttcaacggcacctcttgcccaagtctgggcgggaagcccaaactgttctttattcaggcctgtggaggcgagcagaaagatcacggcttcgaagtggctagcacctcccccgaggacgaatcacctggaagcaaccctgagccagatgcaacccccttccaggaaggcctgaggacatttgaccagctggatgccatctcaagcctgcccacaccttctgacattttcgtctcttacagtactttccctggatttgtgagctggcgcgatccaaagtcaggcagctggtacgtggagacactggacgatatctttgagcagtgggcccattctgaagacctgcagagtctgctgctgcgagtggccaatgctgtctctgtgaaggggatctacaaacagatgccaggatgcttcaactttctgagaaagaaactgttctttaagacctccgcatctagggcc

SEQ ID NO: 47 - protein, 288 aa, Artificial Sequence; identical to SEQ ID NO: 45
  Description of Artificial Sequence: Synthetic polypeptide

SEQ ID NO: 48 - DNA, 864 bp, Artificial Sequence
  Description of Artificial Sequence: Synthetic polynucleotide
gtcgacggatttggtgatgtcggtgctcttgaggctttgaggggaaatgcagatttggcttacatcctgagcatggagccctgtggccactgcctcattatcaacaatgtgaacttctgccgtgagtccgggctccgcacccgcactggctccaacatcgactgtgagaagttgcggcgtcgcttctcctcgctgcatttcatggtggaggtgaagggcgacctgactgccaagaaaatggtgctggctttgctggagctggcgcggcaggaccacggtgctctggactgctgcgtggtggtcattctctctcacggctgtcaggccagccacctgcagttcccaggggctgtctacggcacagatggatgccctgtgtcggtcgagaagattgtgaacatcttcaatgggaccagctgccccagcctgggagggaagcccaagctctttttcatccaggcctgtggtggggagcagaaagaccatgggtttgaggtggcctccacttcccctgaagacgagtcccctggcagtaaccccgagccagatgccaccccgttccaggaaggtttgaggaccttcgaccagctggacgccatatctagtttgcccacacccagtgacatctttgtgtcctactctactttcccaggttttgtttcctggagggaccccaagagtggctcctggtacgttgagaccctggacgacatctttgagcagtgggctcactctgaagacctgcagtccctcctgcttagggtcgctaatgctgtttcggtgaaagggatttataaacagatgcctggttgctttaatttcctccggaaaaaacttttctttaaaacatcagctagcagagcc

SEQ ID NO: 49 - protein, 288 aa, Artificial Sequence
  Description of Artificial Sequence: Synthetic polypeptide
VDGFGDVGALEALRGNADLAYILSMEPCGHCLIINNVNFCRESGLRTRTGSNIDCEKLRRRFSSLHFMVEVKGDLTAKKMVLALLELARQDHGALDCCVVVILSHGCQASHLQFPGAVYGTDGCPVSVEKIVNIFNGTSCPSLGGKPKLFFIQACGGEQKDHGFEVASTSPEDESPGSNPEPDATPFQEGLRTFDQLDAISSLPTPSDIFVSYSTFPGFVSWRDPKSGSWYVETLDDIFEQWAHSEDLQSLLLRVANAVSVKGIYKQMPGCFNFLRKKLFFKTSASRA

SEQ ID NO: 50 - DNA, 864 bp, Artificial Sequence
  Description of Artificial Sequence: Synthetic polynucleotide
gtcgacggatttggtgatgtcggtgctcttgaggacttgaggggaaatgcagatttggcttacatcctgagcatggagccctgtggccactgcctcattatcaacaatgtgaacttctgccgtgagtccgggctccgcacccgcactggctccaacatcgactgtgagaagttgcggcgtcgcttctcctcgctgcatttcatggtggaggtgaagggcgacctgactgccaagaaaatggtgctggctttgctggagctggcgcggcaggaccacggtgctctggactgctgcgtggtggtcattctctctcacggctgtcaggccagccacctgcagttcccaggggctgtctacggcacagatggatgccctgtgtcggtcgagaagattgtgaacatcttcaatgggaccagctgccccagcctgggagggaagcccaagctctttttcatccaggcctgtggtggggagcagaaagaccatgggtttgaggtggcctccacttcccctgaagacgagtcccctggcagtaaccccgagccagatgccaccccgttccaggaaggtttgaggaccttcgaccagctggacgccatatctagtttgcccacacccagtgacatctttgtgtcctactctactttcccaggttttgtttcctggagggaccccaagagtggctcctggtacgttgagaccctggacgacatctttgagcagtgggctcactctgaagacctgcagtccctcctgcttagggtcgctaatgctgtttcggtgaaagggatttataaacagatgcctggttgctttaatttcctccggaaaaaacttttctttaaaacatcagctagcagagcc

SEQ ID NO: 51 - protein, 288 aa, Artificial Sequence
  Description of Artificial Sequence: Synthetic polypeptide
VDGFGDVGALEDLRGNADLAYILSMEPCGHCLIINNVNFCRESGLRTRTGSNIDCEKLRRRFSSLHFMVEVKGDLTAKKMVLALLELARQDHGALDCCVVVILSHGCQASHLQFPGAVYGTDGCPVSVEKIVNIFNGTSCPSLGGKPKLFFIQACGGEQKDHGFEVASTSPEDESPGSNPEPDATPFQEGLRTFDQLDAISSLPTPSDIFVSYSTFPGFVSWRDPKSGSWYVETLDDIFEQWAHSEDLQSLLLRVANAVSVKGIYKQMPGCFNFLRKKLFFKTSASRA

SEQ ID NO: 52 - DNA, 864 bp, Artificial Sequence
  Description of Artificial Sequence: Synthetic polynucleotide
gtcgacggatttggtgatgtcggtgctcttgagagtttgaggggaaatgcagatttggcttacatcctgagcatggagccctgtggccactgcctcattatcaacaatgtgaacttctgccgtgagtccgggctccgcacccgcactggcgccaacatcgactgtgagaagttgcggcgtcgcttctcctcgctgcatttcatggtggaggtgaagggcgacctgactgccaagaaaatggtgctggctttgctggagctggcgcggcaggaccacggtgctctggactgctgcgtggtggtcattctctctcacggctgtcaggccagccacctgcagttcccaggggctgtctacggcacagatggatgccctgtgtcggtcgagaagattgtgaacatcttcaatgggaccagctgccccagcctgggagggaagcccaagctctttttcatccaggcctgtggtggggagcagaaagaccatgggtttgaggtggcctccacttcccctgaagacgagtcccctggcagtaaccccgagccagatgccaccccgttccaggaaggtttgaggaccttcgaccagctggacgccatatctagtttgcccacacccagtgacatctttgtgtcctactctactttcccaggttttgtttcctggagggaccccaagagtggctcctggtacgttgagaccctggacgacatctttgagcagtgggctcactctgaagacctgcagtccctcctgcttagggtcgctaatgctgtttcggtgaaagggatttataaacagatgcctggttgctttaatttcctccggaaaaaacttttctttaaaacatcagctagcagagcc

SEQ ID NO: 53 - protein, 288 aa, Artificial Sequence
  Description of Artificial Sequence: Synthetic polypeptide
VDGFGDVGALESLRGNADLAYILSMEPCGHCLIINNVNFCRESGLRTRTGANIDCEKLRRRFSSLHFMVEVKGDLTAKKMVLALLELARQDHGALDCCVVVILSHGCQASHLQFPGAVYGTDGCPVSVEKIVNIFNGTSCPSLGGKPKLFFIQACGGEQKDHGFEVASTSPEDESPGSNPEPDATPFQEGLRTFDQLDAISSLPTPSDIFVSYSTFPGFVSWRDPKSGSWYVETLDDIFEQWAHSEDLQSLLLRVANAVSVKGIYKQMPGCFNFLRKKLFFKTSASRA

SEQ ID NO: 54 - DNA, 864 bp, Artificial Sequence
  Description of Artificial Sequence: Synthetic polynucleotide
gtcgacggatttggtgatgtcggtgctcttgagagtttgaggggaaatgcagatttggcttacatcctgagcatggagccctgtggccactgcctcattatcaacaatgtgaacttctgccgtgagtccgggctccgcacccgcactggctccaacatcgactgtgagaagttgcggcgtcgcttctccgcgctgcatttcatggtggaggtgaagggcgacctgactgccaagaaaatggtgctggctttgctggagctggcgcggcaggaccacggtgctctggactgctgcgtggtggtcattctctctcacggctgtcaggccagccacctgcagttcccaggggctgtctacggcacagatggatgccctgtgtcggtcgagaagattgtgaacatcttcaatgggaccagctgccccagcctgggagggaagcccaagctctttttcatccaggcctgtggtggggagcagaaagaccatgggtttgaggtggcctccacttcccctgaagacgagtcccctggcagtaaccccgagccagatgccaccccgttccaggaaggtttgaggaccttcgaccagctggacgccatatctagtttgcccacacccagtgacatctttgtgtcctactctactttcccaggttttgtttcctggagggaccccaagagtggctcctggtacgttgagaccctggacgacatctttgagcagtgggctcactctgaagacctgcagtccctcctgcttagggtcgctaatgctgtttcggtgaaagggatttataaacagatgcctggttgctttaatttcctccggaaaaaacttttctttaaaacatcagctagcagagcc

SEQ ID NO: 55 - protein, 288 aa, Artificial Sequence
  Description of Artificial Sequence: Synthetic polypeptide
VDGFGDVGALESLRGNADLAYILSMEPCGHCLIINNVNFCRESGLRTRTGSNIDCEKLRRRFSALHFMVEVKGDLTAKKMVLALLELARQDHGALDCCVVVILSHGCQASHLQFPGAVYGTDGCPVSVEKIVNIFNGTSCPSLGGKPKLFFIQACGGEQKDHGFEVASTSPEDESPGSNPEPDATPFQEGLRTFDQLDAISSLPTPSDIFVSYSTFPGFVSWRDPKSGSWYVETLDDIFEQWAHSEDLQSLLLRVANAVSVKGIYKQMPGCFNFLRKKLFFKTSASRA

SEQ ID NO: 56 - DNA, 864 bp, Artificial Sequence
  Description of Artificial Sequence: Synthetic polynucleotide
gtcgacggatttggtgatgtcggtgctcttgagagtttgaggggaaatgcagatttggcttacatcctgagcatggagccctgtggccactgcctcattatcaacaatgtgaacttctgccgtgagtccgggctccgcacccgcactggctccaacatcgactgtgagaagttgcggcgtcgcttctccgacctgcatttcatggtggaggtgaagggcgacctgactgccaagaaaatggtgctggctttgctggagctggcgcggcaggaccacggtgctctggactgctgcgtggtggtcattctctctcacggctgtcaggccagccacctgcagttcccaggggctgtctacggcacagatggatgccctgtgtcggtcgagaagattgtgaacatcttcaatgggaccagctgccccagcctgggagggaagcccaagctctttttcatccaggcctgtggtggggagcagaaagaccatgggtttgaggtggcctccacttcccctgaagacgagtcccctggcagtaaccccgagccagatgccaccccgttccaggaaggtttgaggaccttcgaccagctggacgccatatctagtttgcccacacccagtgacatctttgtgtcctactctactttcccaggttttgtttcctggagggaccccaagagtggctcctggtacgttgagaccctggacgacatctttgagcagtgggctcactctgaagacctgcagtccctcctgcttagggtcgctaatgctgtttcggtgaaagggatttataaacagatgcctggttgctttaatttcctccggaaaaaacttttctttaaaacatcagctagcagagcc

SEQ ID NO: 57 - protein, 288 aa, Artificial Sequence
  Description of Artificial Sequence: Synthetic polypeptide
VDGFGDVGALESLRGNADLAYILSMEPCGHCLIINNVNFCRESGLRTRTGSNIDCEKLRRRFSDLHFMVEVKGDLTAKKMVLALLELARQDHGALDCCVVVILSHGCQASHLQFPGAVYGTDGCPVSVEKIVNIFNGTSCPSLGGKPKLFFIQACGGEQKDHGFEVASTSPEDESPGSNPEPDATPFQEGLRTFDQLDAISSLPTPSDIFVSYSTFPGFVSWRDPKSGSWYVETLDDIFEQWAHSEDLQSLLLRVANAVSVKGIYKQMPGCFNFLRKKLFFKTSASRA

SEQ ID NO: 58 - DNA, 864 bp, Artificial Sequence
  Description of Artificial Sequence: Synthetic polynucleotide
gtcgacggatttggtgatgtcggtgctcttgagagtttgaggggaaatgcagatttggcttacatcctgagcatggagccctgtggccactgcctcattatcaacaatgtgaacttctgccgtgagtccgggctccgcacccgcactggctccaacatcgactgtgagaagttgcggcgtcgcttctcctcgctgcatttcatggtggaggtgaagggcgacctgactgccaagaaaatggtgctggctttgctggagctggcgcggcaggaccacggtgctctggactgctgcgtggtggtcattctctctcacggctgtcaggccagccacctgcagttcccaggggctgtctacggcacagatggatgccctgtgtcggtcgagaagattgtgaacatcttcaatgggaccagctgccccagcctgggagggaagcccaagctctttttcatccaggccgcgggtggggagcagaaagaccatgggtttgaggtggcctccacttcccctgaagacgagtcccctggcagtaaccccgagccagatgccaccccgttccaggaaggtttgaggaccttcgaccagctggacgccatatctagtttgcccacacccagtgacatctttgtgtcctactctactttcccaggttttgtttcctggagggaccccaagagtggctcctggtacgttgagaccctggacgacatctttgagcagtgggctcactctgaagacctgcagtccctcctgcttagggtcgctaatgctgtttcggtgaaagggatttataaacagatgcctggttgctttaatttcctccggaaaaaacttttctttaaaacatcagctagcagagcc

SEQ ID NO: 59 - protein, 288 aa, Artificial Sequence
  Description of Artificial Sequence: Synthetic polypeptide
VDGFGDVGALESLRGNADLAYILSMEPCGHCLIINNVNFCRESGLRTRTGSNIDCEKLRRRFSSLHFMVEVKGDLTAKKMVLALLELARQDHGALDCCVVVILSHGCQASHLQFPGAVYGTDGCPVSVEKIVNIFNGTSCPSLGGKPKLFFIQAAGGEQKDHGFEVASTSPEDESPGSNPEPDATPFQEGLRTFDQLDAISSLPTPSDIFVSYSTFPGFVSWRDPKSGSWYVETLDDIFEQWAHSEDLQSLLLRVANAVSVKGIYKQMPGCFNFLRKKLFFKTSASRA

SEQ ID NO: 60 - DNA, 864 bp, Artificial Sequence
  Description of Artificial Sequence: Synthetic polynucleotide
gtcgacggatttggtgatgtcggtgctcttgagagtttgaggggaaatgcagatttggcttacatcctgagcatggagccctgtggccactgcctcattatcaacaatgtgaacttctgccgtgagtccgggctccgcacccgcactggctccaacatcgactgtgagaagttgcggcgtcgcttctcctcgctgcatttcatggtggaggtgaagggcgacctgactgccaagaaaatggtgctggctttgctggagctggcgcggcaggaccacggtgctctggactgctgcgtggtggtcattctctctcacggctgtcaggccagccacctgcagttcccaggggctgtctacggcacagatggatgccctgtgtcggtcgagaagattgtgaacatcttcaatgggaccagctgccccagcctgggagggaagcccaagctctttttcatccaggcctgtggtggggagcagaaagaccatgggtttgaggtggcctccacttcccctgaagacgagtcccctggcagtaaccccgagccagatggcaccccgttccaggaaggtttgaggaccttcgaccagctggacgccatatctagtttgcccacacccagtgacatctttgtgtcctactctactttcccaggttttgtttcctggagggaccccaagagtggctcctggtacgttgagaccctggacgacatctttgagcagtgggctcactctgaagacctgcagtccctcctgcttagggtcgctaatgctgtttcggtgaaagggatttataaacagatgcctggttgctttaatttcctccggaaaaaacttttctttaaaacatcagctagcagagcc

SEQ ID NO: 61 - protein, 288 aa, Artificial Sequence
  Description of Artificial Sequence: Synthetic polypeptide
VDGFGDVGALESLRGNADLAYILSMEPCGHCLIINNVNFCRESGLRTRTGSNIDCEKLRRRFSSLHFMVEVKGDLTAKKMVLALLELARQDHGALDCCVVVILSHGCQASHLQFPGAVYGTDGCPVSVEKIVNIFNGTSCPSLGGKPKLFFIQACGGEQKDHGFEVASTSPEDESPGSNPEPDGTPFQEGLRTFDQLDAISSLPTPSDIFVSYSTFPGFVSWRDPKSGSWYVETLDDIFEQWAHSEDLQSLLLRVANAVSVKGIYKQMPGCFNFLRKKLFFKTSASRA

SEQ ID NO: 62 - DNA, 864 bp, Artificial Sequence
  Description of Artificial Sequence: Synthetic polynucleotide
gtcgacggatttggtgatgtcggtgctcttgagagtttgaggggaaatgcagatttggcttacatcctgagcatggagccctgtggccactgcctcattatcaacaatgtgaacttctgccgtgagtccgggctccgcacccgcactggctccaacatcgactgtgagaagttgcggcgtcgcttctcctcgctgcatttcatggtggaggtgaagggcgacctgactgccaagaaaatggtgctggctttgctggagctggcgcggcaggaccacggtgctctggactgctgcgtggtggtcattctctctcacggctgtcaggccagccacctgcagttcccaggggctgtctacggcacagatggatgccctgtgtcggtcgagaagattgtgaacatcttcaatgggaccagctgccccagcctgggagggaagcccaagctctttttcatccaggcctgtggtggggagcagaaagaccatgggtttgaggtggcctccacttcccctgaagacgagtcccctggcagtaaccccgagccagatgccgccccgttccaggaaggtttgaggaccttcgaccagctggacgccatatctagtttgcccacacccagtgacatctttgtgtcctactctactttcccaggttttgtttcctggagggaccccaagagtggctcctggtacgttgagaccctggacgacatctttgagcagtgggctcactctgaagacctgcagtccctcctgcttagggtcgctaatgctgtttcggtgaaagggatttataaacagatgcctggttgctttaatttcctccggaaaaaacttttctttaaaacatcagctagcagagcc

SEQ ID NO: 63 - protein, 288 aa, Artificial Sequence
  Description of Artificial Sequence: Synthetic polypeptide
VDGFGDVGALESLRGNADLAYILSMEPCGHCLIINNVNFCRESGLRTRTGSNIDCEKLRRRFSSLHFMVEVKGDLTAKKMVLALLELARQDHGALDCCVVVILSHGCQASHLQFPGAVYGTDGCPVSVEKIVNIFNGTSCPSLGGKPKLFFIQACGGEQKDHGFEVASTSPEDESPGSNPEPDAAPFQEGLRTFDQLDAISSLPTPSDIFVSYSTFPGFVSWRDPKSGSWYVETLDDIFEQWAHSEDLQSLLLRVANAVSVKGIYKQMPGCFNFLRKKLFFKTSASRA

SEQ ID NO: 64 - DNA, 864 bp, Artificial Sequence
  Description of Artificial Sequence: Synthetic polynucleotide
gtcgacggatttggtgatgtcggtgctcttgagagtttgaggggaaatgcagatttggcttacatcctgagcatggagccctgtggccactgcctcattatcaacaatgtgaacttctgccgtgagtccgggctccgcacccgcactggctccaacatcgactgtgagaagttgcggcgtcgcttctcctcgctgcatttcatggtggaggtgaagggcgacctgactgccaagaaaatggtgctggctttgctggagctggcgcggcaggaccacggtgctctggactgctgcgtggtggtcattctctctcacggctgtcaggccagccacctgcagttcccaggggctgtctacggcacagatggatgccctgtgtcggtcgagaagattgtgaacatcttcaatgggaccagctgccccagcctgggagggaagcccaagctctttttcatccaggcctgtggtggggagcagaaagaccatgggtttgaggtggcctccacttcccctgaagacgagtcccctggcagtaaccccgagccagatgcctgcccgttccaggaaggtttgaggaccttcgaccagctggacgccatatctagtttgcccacacccagtgacatctttgtgtcctactctactttcccaggttttgtttcctggagggaccccaagagtggctcctggtacgttgagaccctggacgacatctttgagcagtgggctcactctgaagacctgcagtccctcctgcttagggtcgctaatgctgtttcggtgaaagggatttataaacagatgcctggttgctttaatttcctccggaaaaaacttttctttaaaacatcagctagcagagcc

SEQ ID NO: 65 - protein, 288 aa, Artificial Sequence
  Description of Artificial Sequence: Synthetic polypeptide
VDGFGDVGALESLRGNADLAYILSMEPCGHCLIINNVNFCRESGLRTRTGSNIDCEKLRRRFSSLHFMVEVKGDLTAKKMVLALLELARQDHGALDCCVVVILSHGCQASHLQFPGAVYGTDGCPVSVEKIVNIFNGTSCPSLGGKPKLFFIQACGGEQKDHGFEVASTSPEDESPGSNPEPDACPFQEGLRTFDQLDAISSLPTPSDIFVSYSTFPGFVSWRDPKSGSWYVETLDDIFEQWAHSEDLQSLLLRVANAVSVKGIYKQMPGCFNFLRKKLFFKTSASRA

SEQ ID NO: 66 - DNA, 864 bp, Artificial Sequence
  Description of Artificial Sequence: Synthetic polynucleotide
gtcgacggatttggtgatgtcggtgctcttgagagtttgaggggaaatgcagatttggcttacatcctgagcatggagccctgtggccactgcctcattatcaacaatgtgaacttctgccgtgagtccgggctccgcacccgcactggctccaacatcgactgtgagaagttgcggcgtcgcttctcctcgctgcatttcatggtggaggtgaagggcgacctgactgccaagaaaatggtgctggctttgctggagctggcgcggcaggaccacggtgctctggactgctgcgtggtggtcattctctctcacggctgtcaggccagccacctgcagttcccaggggctgtctacggcacagatggatgccctgtgtcggtcgagaagattgtgaacatcttcaatgggaccagctgccccagcctgggagggaagcccaagctctttttcatccaggcctgtggtggggagcagaaagaccatgggtttgaggtggcctccacttcccctgaagacgagtcccctggcagtaaccccgagccagatgcctccccgttccaggaaggtttgaggaccttcgaccagctggacgccatatctagtttgcccacacccagtgacatctttgtgtcctactctactttcccaggttttgtttcctggagggaccccaagagtggctcctggtacgttgagaccctggacgacatctttgagcagtgggctcactctgaagacctgcagtccctcctgcttagggtcgctaatgctgtttcggtgaaagggatttataaacagatgcctggttgctttaatttcctccggaaaaaacttttctttaaaacatcagctagcagagcc

SEQ ID NO: 67 - protein, 288 aa, Artificial Sequence
  Description of Artificial Sequence: Synthetic polypeptide
VDGFGDVGALESLRGNADLAYILSMEPCGHCLIINNVNFCRESGLRTRTGSNIDCEKLRRRFSSLHFMVEVKGDLTAKKMVLALLELARQDHGALDCCVVVILSHGCQASHLQFPGAVYGTDGCPVSVEKIVNIFNGTSCPSLGGKPKLFFIQACGGEQKDHGFEVASTSPEDESPGSNPEPDASPFQEGLRTFDQLDAISSLPTPSDIFVSYSTFPGFVSWRDPKSGSWYVETLDDIFEQWAHSEDLQSLLLRVANAVSVKGIYKQMPGCFNFLRKKLFFKTSASRA

SEQ ID NO: 68 - DNA, 864 bp, Artificial Sequence
  Description of Artificial Sequence: Synthetic polynucleotide
gtcgacggatttggtgatgtcggtgctcttgagagtttgaggggaaatgcagatttggcttacatcctgagcatggagccctgtggccactgcctcattatcaacaatgtgaacttctgccgtgagtccgggctccgcacccgcactggctccaacatcgactgtgagaagttgcggcgtcgcttctcctcgctgcatttcatggtggaggtgaagggcgacctgactgccaagaaaatggtgctggctttgctggagctggcgcggcaggaccacggtgctctggactgctgcgtggtggtcattctctctcacggctgtcaggccagccacctgcagttcccaggggctgtctacggcacagatggatgccctgtgtcggtcgagaagattgtgaacatcttcaatgggaccagctgccccagcctgggagggaagcccaagctctttttcatccaggcctgtggtggggagcagaaagaccatgggtttgaggtggcctccacttcccctgaagacgagtcccctggcagtaaccccgagccagatgccaccccgttccaggaaggtttgaggaccaaggaccagctggacgccatatctagtttgcccacacccagtgacatctttgtgtcctactctactttcccaggttttgtttcctggagggaccccaagagtggctcctggtacgttgagaccctggacgacatctttgagcagtgggctcactctgaagacctgcagtccctcctgcttagggtcgctaatgctgtttcggtgaaagggatttataaacagatgcctggttgctttaatttcctccggaaaaaacttttctttaaaacatcagctagcagagcc

SEQ ID NO: 69 - protein, 288 aa, Artificial Sequence
  Description of Artificial Sequence: Synthetic polypeptide
VDGFGDVGALESLRGNADLAYILSMEPCGHCLIINNVNFCRESGLRTRTGSNIDCEKLRRRFSSLHFMVEVKGDLTAKKMVLALLELARQDHGALDCCVVVILSHGCQASHLQFPGAVYGTDGCPVSVEKIVNIFNGTSCPSLGGKPKLFFIQACGGEQKDHGFEVASTSPEDESPGSNPEPDATPFQEGLRTKDQLDAISSLPTPSDIFVSYSTFPGFVSWRDPKSGSWYVETLDDIFEQWAHSEDLQSLLLRVANAVSVKGIYKQMPGCFNFLRKKLFFKTSASRA

SEQ ID NO: 70 - DNA, 864 bp, Artificial Sequence
  Description of Artificial Sequence: Synthetic polynucleotide
gtcgacggatttggtgatgtcggtgctcttgagagtttgaggggaaatgcagatttggcttacatcctgagcatggagccctgtggccactgcctcattatcaacaatgtgaacttctgccgtgagtccgggctccgcacccgcactggctccaacatcgactgtgagaagttgcggcgtcgcttctcctcgctgcatttcatggtggaggtgaagggcgacctgactgccaagaaaatggtgctggctttgctggagctggcgcggcaggaccacggtgctctggactgctgcgtggtggtcattctctctcacggctgtcaggccagccacctgcagttcccaggggctgtctacggcacagatggatgccctgtgtcggtcgagaagattgtgaacatcttcaatgggaccagctgccccagcctgggagggaagcccaagctctttttcatccaggcctgtggtggggagcagaaagaccatgggtttgaggtggcctccacttcccctgaagacgagtcccctggcagtaaccccgagccagatgccaccccgttccaggaaggtttgaggaccttcaagcagctggacgccatatctagtttgcccacacccagtgacatctttgtgtcctactctactttcccaggttttgtttcctggagggaccccaagagtggctcctggtacgttgagaccctggacgacatctttgagcagtgggctcactctgaagacctgcagtccctcctgcttagggtcgctaatgctgtttcggtgaaagggatttataaacagatgcctggttgctttaatttcctccggaaaaaacttttctttaaaacatcagctagcagagcc

SEQ ID NO: 71 - protein, 288 aa, Artificial Sequence
  Description of Artificial Sequence: Synthetic polypeptide
VDGFGDVGALESLRGNADLAYILSMEPCGHCLIINNVNFCRESGLRTRTGSNIDCEKLRRRFSSLHFMVEVKGDLTAKKMVLALLELARQDHGALDCCVVVILSHGCQASHLQFPGAVYGTDGCPVSVEKIVNIFNGTSCPSLGGKPKLFFIQACGGEQKDHGFEVASTSPEDESPGSNPEPDATPFQEGLRTFKQLDAISSLPTPSDIFVSYSTFPGFVSWRDPKSGSWYVETLDDIFEQWAHSEDLQSLLLRVANAVSVKGIYKQMPGCFNFLRKKLFFKTSASRA

SEQ ID NO: 72 - DNA, 864 bp, Artificial Sequence
  Description of Artificial Sequence: Synthetic polynucleotide
gtcgacggatttggtgatgtcggtgctcttgagagtttgaggggaaatgcagatttggcttacatcctgagcatggagccctgtggccactgcctcattatcaacaatgtgaacttctgccgtgagtccgggctccgcacccgcactggctccaacatcgactgtgagaagttgcggcgtcgcttctcctcgctgcatttcatggtggaggtgaagggcgacctgactgccaagaaaatggtgctggctttgctggagctggcgcggcaggaccacggtgctctggactgctgcgtggtggtcattctctctcacggctgtcaggccagccacctgcagttcccaggggctgtctacggcacagatggatgccctgtgtcggtcgagaagattgtgaacatcttcaatgggaccagctgccccagcctgggagggaagcccaagctctttttcatccaggcctgtggtggggagcagaaagaccatgggtttgaggtggcctccacttcccctgaagacgagtcccctggcagtaaccccgagccagatgccaccccgttccaggaaggtttgaggaccttcaggcagctggacgccatatctagtttgcccacacccagtgacatctttgtgtcctactctactttcccaggttttgtttcctggagggaccccaagagtggctcctggtacgttgagaccctggacgacatctttgagcagtgggctcactctgaagacctgcagtccctcctgcttagggtcgctaatgctgtttcggtgaaagggatttataaacagatgcctggttgctttaatttcctccggaaaaaacttttctttaaaacatcagctagcagagcc

SEQ ID NO: 73 - protein, 288 aa, Artificial Sequence
  Description of Artificial Sequence: Synthetic polypeptide
VDGFGDVGALESLRGNADLAYILSMEPCGHCLIINNVNFCRESGLRTRTGSNIDCEKLRRRFSSLHFMVEVKGDLTAKKMVLALLELARQDHGALDCCVVVILSHGCQASHLQFPGAVYGTDGCPVSVEKIVNIFNGTSCPSLGGKPKLFFIQACGGEQKDHGFEVASTSPEDESPGSNPEPDATPFQEGLRTFRQLDAISSLPTPSDIFVSYSTFPGFVSWRDPKSGSWYVETLDDIFEQWAHSEDLQSLLLRVANAVSVKGIYKQMPGCFNFLRKKLFFKTSASRA

SEQ ID NO: 74 - DNA, 864 bp, Artificial Sequence
  Description of Artificial Sequence: Synthetic polynucleotide
gtcgacggatttggtgatgtcggtgctcttgagagtttgaggggaaatgcagatttggcttacatcctgagcatggagccctgtggccactgcctcattatcaacaatgtgaacttctgccgtgagtccgggctccgcacccgcactggctccaacatcgactgtgagaagttgcggcgtcgcttctcctcgctgcatttcatggtggaggtgaagggcgacctgactgccaagaaaatggtgctggctttgctggagctggcgcggcaggaccacggtgctctggactgctgcgtggtggtcattctctctcacggctgtcaggccagccacctgcagttcccaggggctgtctacggcacagatggatgccctgtgtcggtcgagaagattgtgaacatcttcaatgggaccagctgccccagcctgggagggaagcccaagctctttttcatccaggcctgtggtggggagcagaaagaccatgggtttgaggtggcctccacttcccctgaagacgagtcccctggcagtaaccccgagccagatgccaccccgttccaggaaggtttgaggaccttcggccagctggacgccatatctagtttgcccacacccagtgacatctttgtgtcctactctactttcccaggttttgtttcctggagggaccccaagagtggctcctggtacgttgagaccctggacgacatctttgagcagtgggctcactctgaagacctgcagtccctcctgcttagggtcgctaatgctgtttcggtgaaagggatttataaacagatgcctggttgctttaatttcctccggaaaaaacttttctttaaaacatcagctagcagagcc

SEQ ID NO: 75 - protein, 288 aa, Artificial Sequence
  Description of Artificial Sequence: Synthetic polypeptide
VDGFGDVGALESLRGNADLAYILSMEPCGHCLIINNVNFCRESGLRTRTGSNIDCEKLRRRFSSLHFMVEVKGDLTAKKMVLALLELARQDHGALDCCVVVILSHGCQASHLQFPGAVYGTDGCPVSVEKIVNIFNGTSCPSLGGKPKLFFIQACGGEQKDHGFEVASTSPEDESPGSNPEPDATPFQEGLRTFGQLDAISSLPTPSDIFVSYSTFPGFVSWRDPKSGSWYVETLDDIFEQWAHSEDLQSLLLRVANAVSVKGIYKQMPGCFNFLRKKLFFKTSASRA

SEQ ID NO: 76 - DNA, 864 bp, Artificial Sequence
  Description of Artificial Sequence: Synthetic polynucleotide
gtcgacggatttggtgatgtcggtgctcttgagagtttgaggggaaatgcagatttggcttacatcctgagcatggagccctgtggccactgcctcattatcaacaatgtgaacttctgccgtgagtccgggctccgcacccgcactggctccaacatcgactgtgagaagttgcggcgtcgcttctcctcgctgcatttcatggtggaggtgaagggcgacctgactgccaagaaaatggtgctggctttgctggagctggcgcggcaggaccacggtgctctggactgctgcgtggtggtcattctctctcacggctgtcaggccagccacctgcagttcccaggggctgtctacggcacagatggatgccctgtgtcggtcgagaagattgtgaacatcttcaatgggaccagctgccccagcctgggagggaagcccaagctctttttcatccaggcctgtggtggggagcagaaagaccatgggtttgaggtggcctccacttcccctgaagacgagtcccctggcagtaaccccgagccagatgccaccccgttccaggaaggtttgaggaccttcgacaagctggacgccatatctagtttgcccacacccagtgacatctttgtgtcctactctactttcccaggttttgtttcctggagggaccccaagagtggctcctggtacgttgagaccctggacgacatctttgagcagtgggctcactctgaagacctgcagtccctcctgcttagggtcgctaatgctgtttcggtgaaagggatttataaacagatgcctggttgctttaatttcctccggaaaaaacttttctttaaaacatcagctagcagagcc

SEQ ID NO: 77 - protein, 288 aa, Artificial Sequence
  Description of Artificial Sequence: Synthetic polypeptide
VDGFGDVGALESLRGNADLAYILSMEPCGHCLIINNVNFCRESGLRTRTGSNIDCEKLRRRFSSLHFMVEVKGDLTAKKMVLALLELARQDHGALDCCVVVILSHGCQASHLQFPGAVYGTDGCPVSVEKIVNIFNGTSCPSLGGKPKLFFIQACGGEQKDHGFEVASTSPEDESPGSNPEPDATPFQEGLRTFDKLDAISSLPTPSDIFVSYSTFPGFVSWRDPKSGSWYVETLDDIFEQWAHSEDLQSLLLRVANAVSVKGIYKQMPGCFNFLRKKLFFKTSASRA

SEQ ID NO: 78 - DNA, 864 bp, Artificial Sequence
  Description of Artificial Sequence: Synthetic polynucleotide
gtcgacggatttggtgatgtcggtgctcttgagagtttgaggggaaatgcagatttggcttacatcctgagcatggagccctgtggccactgcctcattatcaacaatgtgaacttctgccgtgagtccgggctccgcacccgcactggctccaacatcgactgtgagaagttgcggcgtcgcttctcctcgctgcatttcatggtggaggtgaagggcgacctgactgccaagaaaatggtgctggctttgctggagctggcgcggcaggaccacggtgctctggactgctgcgtggtggtcattctctctcacggctgtcaggccagccacctgcagttcccaggggctgtctacggcacagatggatgccctgtgtcggtcgagaagattgtgaacatcttcaatgggaccagctgccccagcctgggagggaagcccaagctctttttcatccaggcctgtggtggggagcagaaagaccatgggtttgaggtggcctccacttcccctgaagacgagtcccctggcagtaaccccgagccagatgccaccccgttccaggaaggtttgaggaccttcgacaggctggacgccatatctagtttgcccacacccagtgacatctttgtgtcctactctactttcccaggttttgtttcctggagggaccccaagagtggctcctggtacgttgagaccctggacgacatctttgagcagtgggctcactctgaagacctgcagtccctcctgcttagggtcgctaatgctgtttcggtgaaagggatttataaacagatgcctggttgctttaatttcctccggaaaaaacttttctttaaaacatcagctagcagagcc

SEQ ID NO: 79 - protein, 288 aa, Artificial Sequence
  Description of Artificial Sequence: Synthetic polypeptide
VDGFGDVGALESLRGNADLAYILSMEPCGHCLIINNVNFCRESGLRTRTGSNIDCEKLRRRFSSLHFMVEVKGDLTAKKMVLALLELARQDHGALDCCVVVILSHGCQASHLQFPGAVYGTDGCPVSVEKIVNIFNGTSCPSLGGKPKLFFIQACGGEQKDHGFEVASTSPEDESPGSNPEPDATPFQEGLRTFDRLDAISSLPTPSDIFVSYSTFPGFVSWRDPKSGSWYVETLDDIFEQWAHSEDLQSLLLRVANAVSVKGIYKQMPGCFNFLRKKLFFKTSASRA

SEQ ID NO: 80 - DNA, 864 bp, Artificial Sequence
  Description of Artificial Sequence: Synthetic polynucleotide
gtcgacggatttggtgatgtcggtgctcttgagagtttgaggggaaatgcagatttggcttacatcctgagcatggagccctgtggccactgcctcattatcaacaatgtgaacttctgccgtgagtccgggctccgcacccgcactggctccaacatcgactgtgagaagttgcggcgtcgcttctcctcgctgcatttcatggtggaggtgaagggcgacctgactgccaagaaaatggtgctggctttgctggagctggcgcggcaggaccacggtgctctggactgctgcgtggtggtcattctctctcacggctgtcaggccagccacctgcagttcccaggggctgtctacggcacagatggatgccctgtgtcggtcgagaagattgtgaacatcttcaatgggaccagctgccccagcctgggagggaagcccaagctctttttcatccaggcctgtggtggggagcagaaagaccatgggtttgaggtggcctccacttcccctgaagacgagtcccctggcagtaaccccgagccagatgccaccccgttccaggaaggtttgaggaccttcgaccagaaggacgccatatctagtttgcccacacccagtgacatctttgtgtcctactctactttcccaggttttgtttcctggagggaccccaagagtggctcctggtacgttgagaccctggacgacatctttgagcagtgggctcactctgaagacctgcagtccctcctgcttagggtcgctaatgctgtttcggtgaaagggatttataaacagatgcctggttgctttaatttcctccggaaaaaacttttctttaaaacatcagctagcagagcc

SEQ ID NO: 81 - protein, 288 aa, Artificial Sequence
  Description of Artificial Sequence: Synthetic polypeptide
VDGFGDVGALESLRGNADLAYILSMEPCGHCLIINNVNFCRESGLRTRTGSNIDCEKLRRRFSSLHFMVEVKGDLTAKKMVLALLELARQDHGALDCCVVVILSHGCQASHLQFPGAVYGTDGCPVSVEKIVNIFNGTSCPSLGGKPKLFFIQACGGEQKDHGFEVASTSPEDESPGSNPEPDATPFQEGLRTFDQKDAISSLPTPSDIFVSYSTFPGFVSWRDPKSGSWYVETLDDIFEQWAHSEDLQSLLLRVANAVSVKGIYKQMPGCFNFLRKKLFFKTSASRA

SEQ ID NO: 82 - DNA, 864 bp, Artificial Sequence
  Description of Artificial Sequence: Synthetic polynucleotide
gtcgacggatttggtgatgtcggtgctcttgagagtttgaggggaaatgcagatttggcttacatcctgagcatggagccctgtggccactgcctcattatcaacaatgtgaacttctgccgtgagtccgggctccgcacccgcactggctccaacatcgactgtgagaagttgcggcgtcgcttctcctcgctgcatttcatggtggaggtgaagggcgacctgactgccaagaaaatggtgctggctttgctggagctggcgcggcaggaccacggtgctctggactgctgcgtggtggtcattctctctcacggctgtcaggccagccacctgcagttcccaggggctgtctacggcacagatggatgccctgtgtcggtcgagaagattgtgaacatcttcaatgggaccagctgccccagcctgggagggaagcccaagctctttttcatccaggcctgtggtggggagcagaaagaccatgggtttgaggtggcctccacttcccctgaagacgagtcccctggcagtaaccccgagccagatgccaccccgttccaggaaggtttgaggaccttcgaccaggaggacgccatatctagtttgcccacacccagtgacatctttgtgtcctactctactttcccaggttttgtttcctggagggaccccaagagtggctcctggtacgttgagaccctggacgacatctttgagcagtgggctcactctgaagacctgcagtccctcctgcttagggtcgctaatgctgtttcggtgaaagggatttataaacagatgcctggttgctttaatttcctccggaaaaaacttttctttaaaacatcagctagcagagcc

SEQ ID NO: 83 - protein, 288 aa, Artificial Sequence
  Description of Artificial Sequence: Synthetic polypeptide
VDGFGDVGALESLRGNADLAYILSMEPCGHCLIINNVNFCRESGLRTRTGSNIDCEKLRRRFSSLHFMVEVKGDLTAKKMVLALLELARQDHGALDCCVVVILSHGCQASHLQFPGAVYGTDGCPVSVEKIVNIFNGTSCPSLGGKPKLFFIQACGGEQKDHGFEVASTSPEDESPGSNPEPDATPFQEGLRTFDQEDAISSLPTPSDIFVSYSTFPGFVSWRDPKSGSWYVETLDDIFEQWAHSEDLQSLLLRVANAVSVKGIYKQMPGCFNFLRKKLFFKTSASRA

SEQ ID NO: 84 - DNA, 864 bp, Artificial Sequence
  Description of Artificial Sequence: Synthetic polynucleotide
gtcgacggatttggtgatgtcggtgctcttgagagtttgaggggaaatgcagatttggcttacatcctgagcatggagccctgtggccactgcctcattatcaacaatgtgaacttctgccgtgagtccgggctccgcacccgcactggctccaacatcgactgtgagaagttgcggcgtcgcttctcctcgctgcatttcatggtggaggtgaagggcgacctgactgccaagaaaatggtgctggctttgctggagctggcgcggcaggaccacggtgctctggactgctgcgtggtggtcattctctctcacggctgtcaggccagccacctgcagttcccaggggctgtctacggcacagatggatgccctgtgtcggtcgagaagattgtgaacatcttcaatgggaccagctgccccagcctgggagggaagcccaagctctttttcatccaggcctgtggtggggagcagaaagaccatgggtttgaggtggcctccacttcccctgaagacgagtcccctggcagtaaccccgagccagatgccaccccgttccaggaaggtttgaggaccttcgaccagggcgacgccatatctagtttgcccacacccagtgacatctttgtgtcctactctactttcccaggttttgtttcctggagggaccccaagagtggctcctggtacgttgagaccctggacgacatctttgagcagtgggctcactctgaagacctgcagtccctcctgcttagggtcgctaatgctgtttcggtgaaagggatttataaacagatgcctggttgctttaatttcctccggaaaaaacttttctttaaaacatcagctagcagagcc

SEQ ID NO: 85 - protein, 288 aa, Artificial Sequence
  Description of Artificial Sequence: Synthetic polypeptide
VDGFGDVGALESLRGNADLAYILSMEPCGHCLIINNVNFCRESGLRTRTGSNIDCEKLRRRFSSLHFMVEVKGDLTAKKMVLALLELARQDHGALDCCVVVILSHGCQASHLQFPGAVYGTDGCPVSVEKIVNIFNGTSCPSLGGKPKLFFIQACGGEQKDHGFEVASTSPEDESPGSNPEPDATPFQEGLRTFDQGDAISSLPTPSDIFVSYSTFPGFVSWRDPKSGSWYVETLDDIFEQWAHSEDLQSLLLRVANAVSVKGIYKQMPGCFNFLRKKLFFKTSASRA

SEQ ID NO: 86 - DNA, 864 bp, Artificial Sequence
  Description of Artificial Sequence: Synthetic polynucleotide
gtcgacggatttggtgatgtcggtgctcttgagagtttgaggggaaatgcagatttggcttacatcctgagcatggagccctgtggccactgcctcattatcaacaatgtgaacttctgccgtgagtccgggctccgcacccgcactggctccaacatcgactgtgagaagttgcggcgtcgcttctcctcgctgcatttcatggtggaggtgaagggcgacctgactgccaagaaaatggtgctggctttgctggagctggcgcggcaggaccacggtgctctggactgctgcgtggtggtcattctctctcacggctgtcaggccagccacctgcagttcccaggggctgtctacggcacagatggatgccctgtgtcggtcgagaagattgtgaacatcttcaatgggaccagctgccccagcctgggagggaagcccaagctctttttcatccaggcctgtggtggggagcagaaagaccatgggtttgaggtggcctccacttcccctgaagacgagtcccctggcagtaaccccgagccagatgccaccccgttccaggaaggtttgaggaccttcgaccagctggccgccatatctagtttgcccacacccagtgacatctttgtgtcctactctactttcccaggttttgtttcctggagggaccccaagagtggctcctggtacgttgagaccctggacgacatctttgagcagtgggctcactctgaagacctgcagtccctcctgcttagggtcgctaatgctgtttcggtgaaagggatttataaacagatgcctggttgctttaatttcctccggaaaaaacttttctttaaaacatcagctagcagagcc

SEQ ID NO: 87 - protein, 288 aa, Artificial Sequence
  Description of Artificial Sequence: Synthetic polypeptide
VDGFGDVGALESLRGNADLAYILSMEPCGHCLIINNVNFCRESGLRTRTGSNIDCEKLRRRFSSLHFMVEVKGDLTAKKMVLALLELARQDHGALDCCVVVILSHGCQASHLQFPGAVYGTDGCPVSVEKIVNIFNGTSCPSLGGKPKLFFIQACGGEQKDHGFEVASTSPEDESPGSNPEPDATPFQEGLRTFDQLAAISSLPTPSDIFVSYSTFPGFVSWRDPKSGSWYVETLDDIFEQWAHSEDLQSLLLRVANAVSVKGIYKQMPGCFNFLRKKLFFKTSASRA

SEQ ID NO: 88 - DNA, 864 bp, Artificial Sequence; identical to SEQ ID NO: 86
  Description of Artificial Sequence: Synthetic polynucleotide

SEQ ID NO: 89 - protein, 288 aa, Artificial Sequence
  Description of Artificial Sequence: Synthetic polypeptide
VDGFGDVGALESLRGNADLAYILSMEPCGHCLIINNVNFCRESGLRTRTGSNIDCEKLRRRFSSLHFMVEVKGDLTAKKMVLALLELARQDHGALDCCVVVILSHGCQASHLQFPGAVYGTDGCPVSVEKIVNIFNGTSCPSLGGKPKLFFIQACGGEQKDHGFEVASTSPEDESPGSNPEPDATPFQEGLRTFDQLEAISSLPTPSDIFVSYSTFPGFVSWRDPKSGSWYVETLDDIFEQWAHSEDLQSLLLRVANAVSVKGIYKQMPGCFNFLRKKLFFKTSASRA

SEQ ID NO: 90 - DNA, 864 bp, Artificial Sequence; identical to SEQ ID NO: 86
  Description of Artificial Sequence: Synthetic polynucleotide

SEQ ID NO: 91 - protein, 288 aa, Artificial Sequence
  Description of Artificial Sequence: Synthetic polypeptide
VDGFGDVGALESLRGNADLAYILSMEPCGHCLIINNVNFCRESGLRTRTGSNIDCEKLRRRFSSLHFMVEVKGDLTAKKMVLALLELARQDHGALDCCVVVILSHGCQASHLQFPGAVYGTDGCPVSVEKIVNIFNGTSCPSLGGKPKLFFIQACGGEQKDHGFEVASTSPEDESPGSNPEPDATPFQEGLRTFDQLNAISSLPTPSDIFVSYSTFPGFVSWRDPKSGSWYVETLDDIFEQWAHSEDLQSLLLRVANAVSVKGIYKQMPGCFNFLRKKLFFKTSASRA

SEQ ID NO: 92 - DNA, 864 bp, Artificial Sequence; identical to SEQ ID NO: 86
  Description of Artificial Sequence: Synthetic polynucleotide

SEQ ID NO: 93 - protein, 288 aa, Artificial Sequence
  Description of Artificial Sequence: Synthetic polypeptide
VDGFGDVGALESLRGNADLAYILSMEPCGHCLIINNVNFCRESGLRTRTGSNIDCEKLRRRFSSLHFMVEVKGDLTAKKMVLALLELARQDHGALDCCVVVILSHGCQASHLQFPGAVYGTDGCPVSVEKIVNIFNGTSCPSLGGKPKLFFIQACGGEQKDHGFEVASTSPEDESPGSNPEPDATPFQEGLRTFDQLVAISSLPTPSDIFVSYSTFPGFVSWRDPKSGSWYVETLDDIFEQWAHSEDLQSLLLRVANAVSVKGIYKQMPGCFNFLRKKLFFKTSASRA

SEQ ID NO: 94 - DNA, 864 bp, Artificial Sequence; identical to SEQ ID NO: 86
  Description of Artificial Sequence: Synthetic polynucleotide

SEQ ID NO: 95 - protein, 288 aa, Artificial Sequence
  Description of Artificial Sequence: Synthetic polypeptide
VDGFGDVGALESLRGNADLAYILSMEPCGHCLIINNVNFCRESGLRTRTGSNIDCEKLRRRFSSLHFMVEVKGDLTAKKMVLALLELARQDHGALDCCVVVILSHGCQASHLQFPGAVYGTDGCPVSVEKIVNIFNGTSCPSLGGKPKLFFIQACGGEQKDHGFEVASTSPEDESPGSNPEPDATPFQEGLRTFDQLGAISSLPTPSDIFVSYSTFPGFVSWRDPKSGSWYVETLDDIFEQWAHSEDLQSLLLRVANAVSVKGIYKQMPGCFNFLRKKLFFKTSASRA

SEQ ID NO: 96 - DNA, 864 bp, Artificial Sequence; identical to SEQ ID NO: 86
  Description of Artificial Sequence: Synthetic polynucleotide

SEQ ID NO: 97 - protein, 288 aa, Artificial Sequence
  Description of Artificial Sequence: Synthetic polypeptide
VDGFGDVGALESLRGNADLAYILSMEPCGHCLIINNVNFCRESGLRTRTGSNIDCEKLRRRFSSLHFMVEVKGDLTAKKMVLALLELARQDHGALDCCVVVILSHGCQASHLQFPGAVYGTDGCPVSVEKIVNIFNGTSCPSLGGKPKLFFIQACGGEQKDHGFEVASTSPEDESPGSNPEPDATPFQEGLRTFDQLSAISSLPTPSDIFVSYSTFPGFVSWRDPKSGSWYVETLDDIFEQWAHSEDLQSLLLRVANAVSVKGIYKQMPGCFNFLRKKLFFKTSASRA

SEQ ID NO: 98 - DNA, 864 bp, Artificial Sequence
  Description of Artificial Sequence: Synthetic polynucleotide
gtcgacggatttggtgatgtcggtgctcttgagagtttgaggggaaatgcagatttggcttacatcctgagcatggagccctgtggccactgcctcattatcaacaatgtgaacttctgccgtgagtccgggctccgcacccgcactggctccaacatcgactgtgagaagttgcggcgtcgcttctcctcgctgcatttcatggtggaggtgaagggcgacctgactgccaagaaaatggtgctggctttgctggagctggcgcggcaggaccacggtgctctggactgctgcgtggtggtcattctctctcacggctgtcaggccagccacctgcagttcccaggggctgtctacggcacagatggatgccctgtgtcggtcgagaagattgtgaacatcttcaatgggaccagctgccccagcctgggagggaagcccaagctctttttcatccaggcctgtggtggggagcagaaagaccatgggtttgaggtggcctccacttcccctgaagacgagtcccctggcagtaaccccgagccagatgccaccccgttccaggaaggtttgaggaccttcgaccagctggacaagatatctagtttgcccacacccagtgacatctttgtgtcctactctactttcccaggttttgtttcctggagggaccccaagagtggctcctggtacgttgagaccctggacgacatctttgagcagtgggctcactctgaagacctgcagtccctcctgcttagggtcgctaatgctgtttcggtgaaagggatttataaacagatgcctggttgctttaatttcctccggaaaaaacttttctttaaaacatcagctagcagagcc

SEQ ID NO: 99 - protein, 288 aa, Artificial Sequence
  Description of Artificial Sequence: Synthetic polypeptide
VDGFGDVGALESLRGNADLAYILSMEPCGHCLIINNVNFCRESGLRTRTGSNIDCEKLRRRFSSLHFMVEVKGDLTAKKMVLALLELARQDHGALDCCVVVILSHGCQASHLQFPGAVYGTDGCPVSVEKIVNIFNGTSCPSLGGKPKLFFIQACGGEQKDHGFEVASTSPEDESPGSNPEPDATPFQEGLRTFDQLDKISSLPTPSDIFVSYSTFPGFVSWRDPKSGSWYVETLDDIFEQWAHSEDLQSLLLRVANAVSVKGIYKQMPGCFNFLRKKLFFKTSASRA

SEQ ID NO: 100 - DNA, 864 bp, Artificial Sequence
  Description of Artificial Sequence: Synthetic polynucleotide
gtcgacggatttggtgatgtcggtgctcttgagagtttgaggggaaatgcagatttggcttacatcctgagcatggagccctgtggccactgcctcattatcaacaatgtgaacttctgccgtgagtccgggctccgcacccgcactggctccaacatcgactgtgagaagttgcggcgtcgcttctcctcgctgcatttcatggtggaggtgaagggcgacctgactgccaagaaaatggtgctggctttgctggagctggcgcggcaggaccacggtgctctggactgctgcgtggtggtcattctctctcacggctgtcaggccagccacctgcagttcccaggggctgtctacggcacagatggatgccctgtgtcggtcgagaagattgtgaacatcttcaatgggaccagctgccccagcctgggagggaagcccaagctctttttcatccaggcctgtggtggggagcagaaagaccatgggtttgaggtggcctccacttcccctgaagacgagtcccctggcagtaaccccgagccagatgccaccccgttccaggaaggtttgaggaccttcgaccagctggacgccatatctagtttgcccacacccagtgacatctttgtgtcctactctactttcccaggttttgtttcctggagggaccccaagagtggctcctggtacgttgagaccctggacgacatctttgagcagtgggctcactctgaagacctgcagtccctcctgcttagggtcgctaatgctgtttcggtgaaagggatttataaacagatgcctggttgctataatttcctccggaaaaaacttttctttaaaacatcagctagcagagcc

SEQ ID NO: 101 - protein, 288 aa, Artificial Sequence
  Description of Artificial Sequence: Synthetic polypeptide
VDGFGDVGALESLRGNADLAYILSMEPCGHCLIINNVNFCRESGLRTRTGSNIDCEKLRRRFSSLHFMVEVKGDLTAKKMVLALLELARQDHGALDCCVVVILSHGCQASHLQFPGAVYGTDGCPVSVEKIVNIFNGTSCPSLGGKPKLFFIQACGGEQKDHGFEVASTSPEDESPGSNPEPDATPFQEGLRTFDQLDAISSLPTPSDIFVSYSTFPGFVSWRDPKSGSWYVETLDDIFEQWAHSEDLQSLLLRVANAVSVKGIYKQMPGCYNFLRKKLFFKTSASRA

SEQ ID NO: 102 - DNA, 864 bp, Artificial Sequence
  Description of Artificial Sequence: Synthetic polynucleotide
gtcgacggatttggtgatgtcggtgctcttgagagtttgaggggaaatgcagatttggcttacatcctgagcatggagccctgtggccactgcctcattatcaacaatgtgaacttctgccgtgagtccgggctccgcacccgcactggctccaacatcgactgtgagaagttgcggcgtcgcttctcctcgctgcatttcatggtggaggtgaagggcgacctgactgccaagaaaatggtgctggctttgctggagctggcgcggcaggaccacggtgctctggactgctgcgtggtggtcattctctctcacggctgtcaggccagccacctgcagttcccaggggctgtctacggcacagatggatgccctgtgtcggtcgagaagattgtgaacatcttcaatgggaccagctgccccagcctgggagggaagcccaagctctttttcatccaggcctgtggtggggagcagaaagaccatgggtttgaggtggcctccacttcccctgaagacgagtcccctggcagtaaccccgagccagatgccaccccgttccaggaaggtttgaggaccttcgaccagctggacgccatatctagtttgcccacacccagtgacatctttgtgtcctactctactttcccaggttttgtttcctggagggaccccaagagtggctcctggtacgttgagaccctggacgacatctttgagcagtgggctcactctgaagacctgcagtccctcctgcttagggtcgctaatgctgtttcggtgaaagggatttataaacagatgcctggttgctggaatttcctccggaaaaaacttttctttaaaacatcagctagcagagcc

SEQ ID NO: 103 - protein, 288 aa, Artificial Sequence
  Description of Artificial Sequence: Synthetic polypeptide
VDGFGDVGALESLRGNADLAYILSMEPCGHCLIINNVNFCRESGLRTRTGSNIDCEKLRRRFSSLHFMVEVKGDLTAKKMVLALLELARQDHGALDCCVVVILSHGCQASHLQFPGAVYGTDGCPVSVEKIVNIFNGTSCPSLGGKPKLFFIQACGGEQKDHGFEVASTSPEDESPGSNPEPDATPFQEGLRTFDQLDAISSLPTPSDIFVSYSTFPGFVSWRDPKSGSWYVETLDDIFEQWAHSEDLQSLLLRVANAVSVKGIYKQMPGCWNFLRKKLFFKTSASRA

SEQ ID NO: 104 - DNA, 864 bp, Artificial Sequence
  Description of Artificial Sequence: Synthetic polynucleotide
gtcgacggatttggtgatgtcggtgctcttgagagtttgaggggaaatgcagatttggcttacatcctgagcatggagccctgtggccactgcctcattatcaacaatgtgaacttctgccgtgagtccgggctccgcacccgcactggctccaacatcgactgtgagaagttgcggcgtcgcttctcctcgctgcatttcatggtggaggtgaagggcgacctgactgccaagaaaatggtgctggctttgctggagctggcgcggcaggaccacggtgctctggactgctgcgtggtggtcattctctctcacggctgtcaggccagccacctgcagttcccaggggctgtctacggcacagatggatgccctgtgtcggtcgagaagattgtgaacatcttcaatgggaccagctgccccagcctgggagggaagcccaagctctttttcatccaggcctgtggtggggagcagaaagaccatgggtttgaggtggcctccacttcccctgaagacgagtcccctggcagtaaccccgagccagatgccaccccgttccaggaaggtttgaggaccttcgaccagctggacgccatatctagtttgcccacacccagtgacatctttgtgtcctactctactttcccaggttttgtttcctggagggaccccaagagtggctcctggtacgttgagaccctggacgacatctttgagcagtgggctcactctgaagacctgcagtccctcctgcttagggtcgctaatgctgtttcggtgaaagggatttataaacagatgcctggttgctttcagttcctccggaaaaaacttttctttaaaacatcagctagcagagcc

SEQ ID NO: 105 - protein, 288 aa, Artificial Sequence; identical to SEQ ID NO: 40
  Description of Artificial Sequence: Synthetic polypeptide

SEQ ID NO: 106 - DNA, 864 bp, Artificial Sequence; identical to SEQ ID NO: 39
  Description of Artificial Sequence: Synthetic polynucleotide

SEQ ID NO: 107 - protein, 288 aa, Artificial Sequence; identical to SEQ ID NO: 40
  Description of Artificial Sequence: Synthetic polypeptide

SEQ ID NO: 108 - DNA, 864 bp, Artificial Sequence
  Description of Artificial Sequence: Synthetic polynucleotide
gtcgacggatttggtgatgtcggtgctcttgagagtttgaggggaaatgcagatttggcttacatcctgagcatggagccctgtggccactgcctcattatcaacaatgtgaacttctgccgtgagtccgggctccgcacccgcactggctccaacatcgactgtgagaagttgcggcgtcgcttctcctcgctgcatttcatggtggaggtgaagggcgacctgactgccaagaaaatggtgctggctttgctggagctggcgcggcaggaccacggtgctctggactgctgcgtggtggtcattctctctcacggctgtcaggccagccacctgcagttcccaggggctgtctacggcacagatggatgccctgtgtcggtcgagaagattgtgaacatcttcaatgggaccagctgccccagcctgggagggaagcccaagctctttttcatccaggcctgtggtggggagcagaaagaccatgggtttgaggtggcctccacttcccctgaagacgagtcccctggcagtaaccccgagccagatgccaccccgttccaggaaggtttgaggaccttcgaccagctggacgccatatctagtttgcccacacccagtgacatctttgtgtcctactctactttcccaggttttgtttcctggagggaccccaagagtggctcctggtacgttgagaccctggacgacatctttgagcagtgggctcactctgaagacctgcagtccctcctgcttagggtcgctaatgctgtttcggtgaaagggatttataaacagatgcctggttgctttaatctcctccggaaaaaacttttctttaaaacatcagctagcagagcc

SEQ ID NO: 109 - protein, 288 aa, Artificial Sequence
  Description of Artificial Sequence: Synthetic polypeptide
VDGFGDVGALESLRGNADLAYILSMEPCGHCLIINNVNFCRESGLRTRTGSNIDCEKLRRRFSSLHFMVEVKGDLTAKKMVLALLELARQDHGALDCCVVVILSHGCQASHLQFPGAVYGTDGCPVSVEKIVNIFNGTSCPSLGGKPKLFFIQACGGEQKDHGFEVASTSPEDESPGSNPEPDATPFQEGLRTFDQLDAISSLPTPSDIFVSYSTFPGFVSWRDPKSGSWYVETLDDIFEQWAHSEDLQSLLLRVANAVSVKGIYKQMPGCFNLLRKKLFFKTSASRA

SEQ ID NO: 110 - DNA, 864 bp, Artificial Sequence
  Description of Artificial Sequence: Synthetic polynucleotide
gtcgacggatttggtgatgtcggtgctcttgagagtttgaggggaaatgcagatttggcttacatcctgagcatggagccctgtggccactgcctcattatcaacaatgtgaacttctgccgtgagtccgggctccgcacccgcactggctccaacatcgactgtgagaagttgcggcgtcgcttctcctcgctgcatttcatggtggaggtgaagggcgacctgactgccaagaaaatggtgctggctttgctggagctggcgcggcaggaccacggtgctctggactgctgcgtggtggtcattctctctcacggctgtcaggccagccacctgcagttcccaggggctgtctacggcacagatggatgccctgtgtcggtcgagaagattgtgaacatcttcaatgggaccagctgccccagcctgggagggaagcccaagctctttttcatccaggcctgtggtggggagcagaaagaccatgggtttgaggtggcctccacttcccctgaagacgagtcccctggcagtaaccccgagccagatgccaccccgttccaggaaggtttgaggaccttcgaccagctggacgccatatctagtttgcccacacccagtgacatctttgtgtcctactctactttcccaggttttgtttcctggagggaccccaagagtggctcctggtacgttgagaccctggacgacatctttgagcagtgggctcactctgaagacctgcagtccctcctgcttagggtcgctaatgctgtttcggtgaaagggatttataaacagatgcctggttgctttaattccctccggaaaaaacttttctttaaaacatcagctagcagagcc

SEQ ID NO: 111 - protein, 288 aa, Artificial Sequence
  Description of Artificial Sequence: Synthetic polypeptide
VDGFGDVGALESLRGNADLAYILSMEPCGHCLIINNVNFCRESGLRTRTGSNIDCEKLRRRFSSLHFMVEVKGDLTAKKMVLALLELARQDHGALDCCVVVILSHGCQASHLQFPGAVYGTDGCPVSVEKIVNIFNGTSCPSLGGKPKLFFIQACGGEQKDHGFEVASTSPEDESPGSNPEPDATPFQEGLRTFDQLDAISSLPTPSDIFVSYSTFPGFVSWRDPKSGSWYVETLDDIFEQWAHSEDLQSLLLRVANAVSVKGIYKQMPGCFNTLRKKLFFKTSASRA

SEQ ID NO: 112 - DNA, 864 bp, Artificial Sequence
  Description of Artificial Sequence: Synthetic polynucleotide
gtggacgggtttggagatgtgggagccctggaagccctgcggggcaatgccgatctggcttacatcctgtctatggagccttgcggccactgtctgatcattaacaatgtgaacttctgcagagagagcgggctgcggaccagaacaggatccaatattgactgtgaaaagctgcggagaaggttctctagtctgcactttatggtcgaggtgaaaggcgatctgaccgctaagaaaatggtgctggccctgctggaactggctcggcaggaccatggggcactggattgctgcgtggtcgtgatcctgagtcacggctgccaggcttcacatctgcagttccctggggcagtctatggaactgacggctgtccagtcagcgtggagaagatcgtgaacatcttcaacggcacctcttgcccaagtctgggcgggaagcccaaactgttctttattcaggcctgtggaggcgagcagaaagatcacggcttcgaagtggctagcacctcccccgaggacgaatcacctggaagcaaccctgagccagatgcaacccccttccaggaaggcctgaggacatttgaccagctggatgccatctcaagcctgcccacaccttctgacattttcgtctcttacagtactttccctggatttgtgagctggcgcgatccaaagtcaggcagctggtacgtggagacactggacgatatctttgagcagtgggcccattctgaagacctgcagagtctgctgctgcgagtggccaatgctgtctctgtgaaggggatctacaaacagatgccaggatgcttccagtttctgagaaagaaactgttctttaagacctccgcatctagggcc

SEQ ID NO: 113 - protein, 288 aa, Artificial Sequence
  Description of Artificial Sequence: Synthetic polypeptide
VDGFGDVGALEALRGNADLAYILSMEPCGHCLIINNVNFCRESGLRTRTGSNIDCEKLRRRFSSLHFMVEVKGDLTAKKMVLALLELARQDHGALDCCVVVILSHGCQASHLQFPGAVYGTDGCPVSVEKIVNIFNGTSCPSLGGKPKLFFIQACGGEQKDHGFEVASTSPEDESPGSNPEPDATPFQEGLRTFDQLDAISSLPTPSDIFVSYSTFPGFVSWRDPKSGSWYVETLDDIFEQWAHSEDLQSLLLRVANAVSVKGIYKQMPGCFQFLRKKLFFKTSASRA

SEQ ID NO: 114 - DNA, 864 bp, Artificial Sequence
  Description of Artificial Sequence: Synthetic polynucleotide
gtcgacggatttggtgatgtcggtgctcttgaggctttgaggggaaatgcagatttggcttacatcctgagcatggagccctgtggccactgcctcattatcaacaatgtgaacttctgccgtgagtccgggctccgcacccgcactggctccaacatcgactgtgagaagttgcggcgtcgcttctcctcgctgcatttcatggtggaggtgaagggcgacctgactgccaagaaaatggtgctggctttgctggagctggcgcggcaggaccacggtgctctggactgctgcgtggtggtcattctctctcacggctgtcaggccagccacctgcagttcccaggggctgtctacggcacagatggatgccctgtgtcggtcgagaagattgtgaacatcttcaatgggaccagctgccccagcctgggagggaagcccaagctctttttcatccaggcctgtggtggggagcagaaagaccatgggtttgaggtggcctccacttcccctgaagacgagtcccctggcagtaaccccgagccagatgccaccccgttccaggaaggtttgaggaccttcgaccagctggccgccatatctagtttgcccacacccagtgacatctttgtgtcctactctactttcccaggttttgtttcctggagggaccccaagagtggctcctggtacgttgagaccctggacgacatctttgagcagtgggctcactctgaagacctgcagtccctcctgcttagggtcgctaatgctgtttcggtgaaagggatttataaacagatgcctggttgctttaatttcctccggaaaaaacttttctttaaaacatcagctagcagagcc

SEQ ID NO: 115 - protein, 288 aa, Artificial Sequence
  Description of Artificial Sequence: Synthetic polypeptide
VDGFGDVGALEALRGNADLAYILSMEPCGHCLIINNVNFCRESGLRTRTGSNIDCEKLRRRFSSLHFMVEVKGDLTAKKMVLALLELARQDHGALDCCVVVILSHGCQASHLQFPGAVYGTDGCPVSVEKIVNIFNGTSCPSLGGKPKLFFIQACGGEQKDHGFEVASTSPEDESPGSNPEPDATPFQEGLRTFDQLAAISSLPTPSDIFVSYSTFPGFVSWRDPKSGSWYVETLDDIFEQWAHSEDLQSLLLRVANAVSVKGIYKQMPGCFNFLRKKLFFKTSASRA

SEQ ID NO: 116 - DNA, 864 bp, Artificial Sequence
  Description of Artificial Sequence: Synthetic polynucleotide
gtcgacggatttggtgatgtcggtgctcttgaggacttgaggggaaatgcagatttggcttacatcctgagcatggagccctgtggccactgcctcattatcaacaatgtgaacttctgccgtgagtccgggctccgcacccgcactggctccaacatcgactgtgagaagttgcggcgtcgcttctcctcgctgcatttcatggtggaggtgaagggcgacctgactgccaagaaaatggtgctggctttgctggagctggcgcggcaggaccacggtgctctggactgctgcgtggtggtcattctctctcacggctgtcaggccagccacctgcagttcccaggggctgtctacggcacagatggatgccctgtgtcggtcgagaagattgtgaacatcttcaatgggaccagctgccccagcctgggagggaagcccaagctctttttcatccaggcctgtggtggggagcagaaagaccatgggtttgaggtggcctccacttcccctgaagacgagtcccctggcagtaaccccgagccagatgccaccccgttccaggaaggtttgaggaccttcgaccagctggccgccatatctagtttgcccacacccagtgacatctttgtgtcctactctactttcccaggttttgtttcctggagggaccccaagagtggctcctggtacgttgagaccctggacgacatctttgagcagtgggctcactctgaagacctgcagtccctcctgcttagggtcgctaatgctgtttcggtgaaagggatttataaacagatgcctggttgctttaatttcctccggaaaaaacttttctttaaaacatcagctagcagagcc

SEQ ID NO: 117 - protein, 288 aa, Artificial Sequence
  Description of Artificial Sequence: Synthetic polypeptide
VDGFGDVGALEDLRGNADLAYILSMEPCGHCLIINNVNFCRESGLRTRTGSNIDCEKLRRRFSSLHFMVEVKGDLTAKKMVLALLELARQDHGALDCCVVVILSHGCQASHLQFPGAVYGTDGCPVSVEKIVNIFNGTSCPSLGGKPKLFFIQACGGEQKDHGFEVASTSPEDESPGSNPEPDATPFQEGLRTFDQLAAISSLPTPSDIFVSYSTFPGFVSWRDPKSGSWYVETLDDIFEQWAHSEDLQSLLLRVANAVSVKGIYKQMPGCFNFLRKKLFFKTSASRA

SEQ ID NO: 118 - DNA, 864 bp, Artificial Sequence
  Description of Artificial Sequence: Synthetic polynucleotide
gtcgacggatttggtgatgtcggtgctcttgagagtttgaggggaaatgcagatttggcttacatcctgagcatggagccctgtggccactgcctcattatcaacaatgtgaacttctgccgtgagtccgggctccgcacccgcactggctccaacatcgactgtgagaagttgcggcgtcgcttctccgcgctgcatttcatggtggaggtgaagggcgacctgactgccaagaaaatggtgctggctttgctggagctggcgcggcaggaccacggtgctctggactgctgcgtggtggtcattctctctcacggctgtcaggccagccacctgcagttcccaggggctgtctacggcacagatggatgccctgtgtcggtcgagaagattgtgaacatcttcaatgggaccagctgccccagcctgggagggaagcccaagctctttttcatccaggcctgtggtggggagcagaaagaccatgggtttgaggtggcctccacttcccctgaagacgagtcccctggcagtaaccccgagccagatgccaccccgttccaggaaggtttgaggaccttcgaccagctggccgccatatctagtttgcccacacccagtgacatctttgtgtcctactctactttcccaggttttgtttcctggagggaccccaagagtggctcctggtacgttgagaccctggacgacatctttgagcagtgggctcactctgaagacctgcagtccctcctgcttagggtcgctaatgctgtttcggtgaaagggatttataaacagatgcctggttgctttaatttcctccggaaaaaacttttctttaaaacatcagctagcagagcc

SEQ ID NO: 119 - protein, 288 aa, Artificial Sequence
  Description of Artificial Sequence: Synthetic polypeptide
VDGFGDVGALESLRGNADLAYILSMEPCGHCLIINNVNFCRESGLRTRTGSNIDCEKLRRRFSALHFMVEVKGDLTAKKMVLALLELARQDHGALDCCVVVILSHGCQASHLQFPGAVYGTDGCPVSVEKIVNIFNGTSCPSLGGKPKLFFIQACGGEQKDHGFEVASTSPEDESPGSNPEPDATPFQEGLRTFDQLAAISSLPTPSDIFVSYSTFPGFVSWRDPKSGSWYVETLDDIFEQWAHSEDLQSLLLRVANAVSVKGIYKQMPGCFNFLRKKLFFKTSASRA

SEQ ID NO: 120 - DNA, 864 bp, Artificial Sequence
  Description of Artificial Sequence: Synthetic polynucleotide
gtcgacggatttggtgatgtcggtgctcttgagagtttgaggggaaatgcagatttggcttacatcctgagcatggagccctgtggccactgcctcattatcaacaatgtgaacttctgccgtgagtccgggctccgcacccgcactggctccaacatcgactgtgagaagttgcggcgtcgcttctccgacctgcatttcatggtggaggtgaagggcgacctgactgccaagaaaatggtgctggctttgctggagctggcgcggcaggaccacggtgctctggactgctgcgtggtggtcattctctctcacggctgtcaggccagccacctgcagttcccaggggctgtctacggcacagatggatgccctgtgtcggtcgagaagattgtgaacatcttcaatgggaccagctgccccagcctgggagggaagcccaagctctttttcatccaggcctgtggtggggagcagaaagaccatgggtttgaggtggcctccacttcccctgaagacgagtcccctggcagtaaccccgagccagatgccaccccgttccaggaaggtttgaggaccttcgaccagctggccgccatatctagtttgcccacacccagtgacatctttgtgtcctactctactttcccaggttttgtttcctggagggaccccaagagtggctcctggtacgttgagaccctggacgacatctttgagcagtgggctcactctgaagacctgcagtccctcctgcttagggtcgctaatgctgtttcggtgaaagggatttataaacagatgcctggttgctttaatttcctccggaaaaaacttttctttaaaacatcagctagcagagcc

SEQ ID NO: 121 - protein, 288 aa, Artificial Sequence
  Description of Artificial Sequence: Synthetic polypeptide
VDGFGDVGALESLRGNADLAYILSMEPCGHCLIINNVNFCRESGLRTRTGSNIDCEKLRRRFSDLHFMVEVKGDLTAKKMVLALLELARQDHGALDCCVVVILSHGCQASHLQFPGAVYGTDGCPVSVEKIVNIFNGTSCPSLGGKPKLFFIQACGGEQKDHGFEVASTSPEDESPGSNPEPDATPFQEGLRTFDQLAAISSLPTPSDIFVSYSTFPGFVSWRDPKSGSWYVETLDDIFEQWAHSEDLQSLLLRVANAVSVKGIYKQMPGCFNFLRKKLFFKTSASRA

SEQ ID NO: 122 - DNA, 864 bp, Artificial Sequence
  Description of Artificial Sequence: Synthetic polynucleotide
gtggacgggtttggagatgtgggagccctggaatccctgcggggcaatgccgatctggcttacatcctgtctatggagccttgcggccactgtctgatcattaacaatgtgaacttctgcagagagagcgggctgcggaccagaacaggatccaatattgactgtgaaaagctgcggagaaggttctctagtctgcactttatggtcgaggtgaaaggcgatctgaccgctaagaaaatggtgctggccctgctggaactggctcggcaggaccatggggcactggattgctgcgtggtcgtgatcctgagtcacggctgccaggcttcacatctgcagttccctggggcagtctatggaactgacggctgtccagtcagcgtggagaagatcgtgaacatcttcaacggcacctcttgcccaagtctgggcgggaagcccaaactgttctttattcaggcctgtggaggcgagcagaaagatcacggcttcgaagtggctagcacctcccccgaggacgaatcacctggaagcaaccctgagccagatgcaagccccttccaggaaggcctgaggacatttgaccagctggatgccatctcaagcctgcccacaccttctgacattttcgtctcttacagtactttccctggatttgtgagctggcgcgatccaaagtcaggcagctggtacgtggagacactggacgatatctttgagcagtgggcccattctgaagacctgcagagtctgctgctgcgagtggccaatgctgtctctgtgaaggggatctacaaacagatgccaggatgcttccagtttctgagaaagaaactgttctttaagacctccgcatctagggcc

SEQ ID NO: 123 - protein, 288 aa, Artificial Sequence
  Description of Artificial Sequence: Synthetic polypeptide
VDGFGDVGALESLRGNADLAYILSMEPCGHCLIINNVNFCRESGLRTRTGSNIDCEKLRRRFSSLHFMVEVKGDLTAKKMVLALLELARQDHGALDCCVVVILSHGCQASHLQFPGAVYGTDGCPVSVEKIVNIFNGTSCPSLGGKPKLFFIQACGGEQKDHGFEVASTSPEDESPGSNPEPDASPFQEGLRTFDQLDAISSLPTPSDIFVSYSTFPGFVSWRDPKSGSWYVETLDDIFEQWAHSEDLQSLLLRVANAVSVKGIYKQMPGCFQFLRKKLFFKTSASRA

SEQ ID NO: 124 - DNA, 864 bp, Artificial Sequence
  Description of Artificial Sequence: Synthetic polynucleotide
gtcgacggatttggtgatgtcggtgctcttgagagtttgaggggaaatgcagatttggcttacatcctgagcatggagccctgtggccactgcctcattatcaacaatgtgaacttctgccgtgagtccgggctccgcacccgcactggctccaacatcgactgtgagaagttgcggcgtcgcttctcctcgctgcatttcatggtggaggtgaagggcgacctgactgccaagaaaatggtgctggctttgctggagctggcgcggcaggaccacggtgctctggactgctgcgtggtggtcattctctctcacggctgtcaggccagccacctgcagttcccaggggctgtctacggcacagatggatgccctgtgtcggtcgagaagattgtgaacatcttcaatgggaccagctgccccagcctgggagggaagcccaagctctttttcatccaggcctgtggtggggagcagaaagaccatgggtttgaggtggcctccacttcccctgaagacgagtcccctggcagtaaccccgagccagatgccaccccgttccaggaaggtttgaggaccttcgaccagctggccgccatatctagtttgcccacacccagtgacatctttgtgtcctactctactttcccaggttttgtttcctggagggaccccaagagtggctcctggtacgttgagaccctggacgacatctttgagcagtgggctcactctgaagacctgcagtccctcctgcttagggtcgctaatgctgtttcggtgaaagggatttataaacagatgcctggttgcttcagtttcctccggaaaaaacttttctttaaaacatcagctagcagagcc

SEQ ID NO: 125 - protein, 288 aa, Artificial Sequence
  Description of Artificial Sequence: Synthetic polypeptide
VDGFGDVGALESLRGNADLAYILSMEPCGHCLIINNVNFCRESGLRTRTGSNIDCEKLRRRFSSLHFMVEVKGDLTAKKMVLALLELARQDHGALDCCVVVILSHGCQASHLQFPGAVYGTDGCPVSVEKIVNIFNGTSCPSLGGKPKLFFIQACGGEQKDHGFEVASTSPEDESPGSNPEPDATPFQEGLRTFDQLAAISSLPTPSDIFVSYSTFPGFVSWRDPKSGSWYVETLDDIFEQWAHSEDLQSLLLRVANAVSVKGIYKQMPGCFQFLRKKLFFKTSASRA

SEQ ID NO: 126 - DNA, 864 bp, Artificial Sequence
  Description of Artificial Sequence: Synthetic polynucleotide
gtcgacggatttggtgatgtcggtgctcttgagagtttgaggggaaatgcagatttggcttacatcctgagcatggagccctgtggccactgcctcattatcaacaatgtgaacttctgccgtgagtccgggctccgcacccgcactggctccaacatcgactgtgagaagttgcggcgtcgcttctcctcgctgcatttcatggtggaggtgaagggcgacctgactgccaagaaaatggtgctggctttgctggagctggcgcggcaggaccacggtgctctggactgctgcgtggtggtcattctctctcacggctgtcaggccagccacctgcagttcccaggggctgtctacggcacagatggatgccctgtgtcggtcgagaagattgtgaacatcttcaatgggaccagctgccccagcctgggagggaagcccaagctctttttcatccaggcctgtggtggggagcagaaagaccatgggtttgaggtggcctccacttcccctgaagacgagtcccctggcagtaaccccgagccagatgccgtgcccatccaggaaggtttgaggaccttcgaccagctggacgccatatctagtttgcccacacccagtgacatctttgtgtcctactctactttcccaggttttgtttcctggagggaccccaagagtggctcctggtacgttgagaccctggacgacatctttgagcagtgggctcactctgaagacctgcagtccctcctgcttagggtcgctaatgctgtttcggtgaaagggatttataaacagatgcctggttgctttaatttcctccggaaaaaacttttctttaaaacatcagctagcagagcc

SEQ ID NO: 127 - protein, 288 aa, Artificial Sequence
  Description of Artificial Sequence: Synthetic polypeptide
VDGFGDVGALESLRGNADLAYILSMEPCGHCLIINNVNFCRESGLRTRTGSNIDCEKLRRRFSSLHFMVEVKGDLTAKKMVLALLELARQDHGALDCCVVVILSHGCQASHLQFPGAVYGTDGCPVSVEKIVNIFNGTSCPSLGGKPKLFFIQACGGEQKDHGFEVASTSPEDESPGSNPEPDAVPIQEGLRTFDQLDAISSLPTPSDIFVSYSTFPGFVSWRDPKSGSWYVETLDDIFEQWAHSEDLQSLLLRVANAVSVKGIYKQMPGCFNFLRKKLFFKTSASRA

SEQ ID NO: 128 - DNA, 864 bp, Artificial Sequence
  Description of Artificial Sequence: Synthetic polynucleotide
gtcgacggatttggtgatgtcggtgctcttgagagtttgaggggaaatgcagatttggcttacatcctgagcatggagccctgtggccactgcctcattatcaacaatgtgaacttctgccgtgagtccgggctccgcacccgcactggctccaacatcgactgtgagaagttgcggcgtcgcttctcctcgctgcatttcatggtggaggtgaagggcgacctgactgccaagaaaatggtgctggctttgctggagctggcgcggcaggaccacggtgctctggactgctgcgtggtggtcattctctctcacggctgtcaggccagccacctgcagttcccaggggctgtctacggcacagatggatgccctgtgtcggtcgagaagattgtgaacatcttcaatgggaccagctgccccagcctgggagggaagcccaagctctttttcatccaggcctgtggtggggagcagaaagaccatgggtttgaggtggcctccacttcccctgaagacgagtcccctggcagtaaccccgagccagatgccaccccgttccaggaaggtttgaggaccttcgaccagctggacgccatatctagtttgcccacacccagtgacatctttgtgtcctactctactttcccaggttttgtttcctggagggaccccaagagtggctcctggtacgttgagaccctggacgacatctttgagcagtgggctcactctgaagacctgcagtccctcctgcttagggtcgctaatgctgtttcggtgaaagggatttataaacagatgccgatatccgcacagacactccggaaaaaacttttctttaaaacatcagctagcagagcc

SEQ ID NO: 129 - protein, 288 aa, Artificial Sequence
  Description of Artificial Sequence: Synthetic polypeptide
VDGFGDVGALESLRGNADLAYILSMEPCGHCLIINNVNFCRESGLRTRTGSNIDCEKLRRRFSSLHFMVEVKGDLTAKKMVLALLELARQDHGALDCCVVVILSHGCQASHLQFPGAVYGTDGCPVSVEKIVNIFNGTSCPSLGGKPKLFFIQACGGEQKDHGFEVASTSPEDESPGSNPEPDATPFQEGLRTFDQLDAISSLPTPSDIFVSYSTFPGFVSWRDPKSGSWYVETLDDIFEQWAHSEDLQSLLLRVANAVSVKGIYKQMPISAQTLRKKLFFKTSASRA

SEQ ID NO: 130 - DNA, 330 bp, Artificial Sequence; identical to SEQ ID NO: 35
  Description of Artificial Sequence: Synthetic polynucleotide

SEQ ID NO: 131 - protein, 110 aa, Artificial Sequence; identical to SEQ ID NO: 36
  Description of Artificial Sequence: Synthetic polypeptide

SEQ ID NO: 132 - DNA, 18 bp, Artificial Sequence
  Description of Artificial Sequence: Synthetic oligonucleotide
agcggaggaggatccgga

SEQ ID NO: 133 - protein, 6 aa, Artificial Sequence
  Description of Artificial Sequence: Synthetic peptide
SGGGSG

SEQ ID NO: 134 - DNA, 864 bp, Artificial Sequence; identical to SEQ ID NO: 46
  Description of Artificial Sequence: Synthetic polynucleotide

SEQ ID NO: 135 - protein, 288 aa, Artificial Sequence; identical to SEQ ID NO: 45
  Description of Artificial Sequence: Synthetic polypeptide

SEQ ID NO: 136 - DNA, 6 bp, Artificial Sequence
  Description of Artificial Sequence: Synthetic oligonucleotide
ccgcgg

SEQ ID NO: 137 - protein, 2 aa, Artificial Sequence
  Description of Artificial Sequence: Synthetic peptide
PR

SEQ ID NO: 138 - DNA, 54 bp, Artificial Sequence
  Description of Artificial Sequence: Synthetic oligonucleotide
gaaggccgagggagcctgctgacatgtggcgatgtggaggaaaacccaggacca

SEQ ID NO: 139 - protein, 18 aa, Artificial Sequence
  Description of Artificial Sequence: Synthetic peptide
EGRGSLLTCGDVEENPGP

SEQ ID NO: 140 - DNA, 6 bp, Artificial Sequence
  Description of Artificial Sequence: Synthetic oligonucleotide
ccatgg

SEQ ID NO: 141 - protein, 2 aa, Artificial Sequence
  Description of Artificial Sequence: Synthetic peptide
PW

SEQ ID NO: 142 - DNA, 63 bp, Artificial Sequence
  Description of Artificial Sequence: Synthetic oligonucleotide
atggagtttggactttcttggttgtttttggtggcaattctgaagggtgtccagtgtagcagg

SEQ ID NO: 143 - protein, 21 aa, Artificial Sequence
  Description of Artificial Sequence: Synthetic peptide
MEFGLSWLFLVAILKGVQCSR

SEQ ID NO: 144 - DNA, 321 bp, Artificial Sequence
  Description of Artificial Sequence: Synthetic polynucleotide
gacatccagatgacacagactacatcctccctgtctgcctctctgggagacagagtcaccatcagttgcagggcaagtcaggacattagtaaatatttaaattggtatcagcagaaaccagatggaactgttaaactcctgatctaccatacatcaagattacactcaggagtcccatcaaggttcagtggcagtgggtctggaacagattattctctcaccattagcaacctggagcaagaagatattgccacttacttttgccaacagggtaatacgcttccgtacacgttcggaggggggactaagttggaaataaca

SEQ ID NO: 145 - protein, 107 aa, Artificial Sequence
  Description of Artificial Sequence: Synthetic polypeptide
DIQMTQTTSSLSASLGDRVTISCRASQDISKYLNWYQQKPDGTVKLLIYHTSRLHSGVPSRFSGSGSGTDYSLTISNLEQEDIATYFCQQGNTLPYTFGGGTKLEIT

SEQ ID NO: 146 - DNA, 24 bp, Artificial Sequence
  Description of Artificial Sequence: Synthetic oligonucleotide
ggcggaggaagcggaggtgggggc

SEQ ID NO: 147 - protein, 8 aa, Artificial Sequence
  Description of Artificial Sequence: Synthetic peptide
GGGSGGGG

SEQ ID NO: 148 - DNA, 360 bp, Artificial Sequence
  Description of Artificial Sequence: Synthetic polynucleotide
gaggtgaaactgcaggagtcaggacctggcctggtggcgccctcacagagcctgtccgtcacatgcactgtctcaggggtctcattacccgactatggtgtaagctggattcgccagcctccacgaaagggtctggagtggctgggagtaatatggggtagtgaaaccacatactataattcagctctcaaatccagactgaccatcatcaaggacaactccaagagccaagttttcttaaaaatgaacagtctgcaaactgatgacacagccatttactactgtgccaaacattattactacggtggtagctatgctatggactactggggtcaaggaacctcagtcaccgtctcctca

SEQ ID NO: 149 - protein, 120 aa, Artificial Sequence
  Description of Artificial Sequence: Synthetic polypeptide
EVKLQESGPGLVAPSQSLSVTCTVSGVSLPDYGVSWIRQPPRKGLEWLGVIWGSETTYYNSALKSRLTIIKDNSKSQVFLKMNSLQTDDTAIYYCAKHYYYGGSYAMDYWGQGTSVTVSS

SEQ ID NO: 150 - DNA, 6 bp, Artificial Sequence
  Description of Artificial Sequence: Synthetic oligonucleotide
ggatcc

SEQ ID NO: 151 - protein, 2 aa, Artificial Sequence
  Description of Artificial Sequence: Synthetic peptide
GS

SEQ ID NO: 152 - DNA, 48 bp, Artificial Sequence
  Description of Artificial Sequence: Synthetic oligonucleotide
gaacttcctactcaggggactttctcaaacgttagcacaaacgtaagt

SEQ ID NO: 153 - protein, 16 aa, Artificial Sequence
  Description of Artificial Sequence: Synthetic peptide
ELPTQGTFSNVSTNVS

SEQ ID NO: 154 - DNA, 126 bp, Artificial Sequence
  Description of Artificial Sequence: Synthetic polynucleotide
cccgccccaagaccccccacacctgcgccgaccattgcttctcaacccctgagtttgagacccgaggcctgccggccagctgccggcggggccgtgcatacaagaggactcgatttcgcttgcgac

SEQ ID NO: 155 - protein, 42 aa, Artificial Sequence
  Description of Artificial Sequence: Synthetic polypeptide
PAPRPPTPAPTIASQPLSLRPEACRPAAGGAVHTRGLDFACD

SEQ ID NO: 156 - DNA, 111 bp, Artificial Sequence
  Description of Artificial Sequence: Synthetic polynucleotide
atctatatctgggcacctctcgctggcacctgtggagtccttctgctcagcctggttattactctgtactgtaatcaccggaatcgccgccgcgtttgtaagtgtcccagg

SEQ ID NO: 157 - protein, 37 aa, Artificial Sequence
  Description of Artificial Sequence: Synthetic polypeptide
IYIWAPLAGTCGVLLLSLVITLYCNHRNRRRVCKCPR

SEQ ID NO: 158 - DNA, 6 bp, Artificial Sequence
  Description of Artificial Sequence: Synthetic oligonucleotide
gtcgac

SEQ ID NO: 159 - protein, 2 aa, Artificial Sequence
  Description of Artificial Sequence: Synthetic peptide
VD

SEQ ID NO: 160 - DNA, 336 bp, Artificial Sequence
  Description of Artificial Sequence: Synthetic polynucleotide
agagtgaagttcagcaggagcgcagacgcccccgcgtaccagcagggccagaaccagctctataacgagctcaatctaggacgaagagaggagtacgatgttttggacaagagacgtggccgggaccctgagatggggggaaagccgagaaggaagaaccctcaggaaggcctgtacaatgaactgcagaaagataagatggcggaggcctacagtgagattgggatgaaaggcgagcgccggaggggcaaggggcacgatggcctttaccagggtctcagtacagccaccaaggacacctacgacgcccttcacatgcaggccctgccccctcgc

SEQ ID NO: 161 - protein, 112 aa, Artificial Sequence
  Description of Artificial Sequence: Synthetic polypeptide
RVKFSRSADAPAYQQGQNQLYNELNLGRREEYDVLDKRRGRDPEMGGKPRRKNPQEGLYNELQKDKMAEAYSEIGMKGERRRGKGHDGLYQGLSTATKDTYDALHMQALPPR

SEQ ID NO: 162 - DNA, 63 bp, Artificial Sequence; identical to SEQ ID NO: 142
  Description of Artificial Sequence: Synthetic oligonucleotide

SEQ ID NO: 163 - protein, 21 aa, Artificial Sequence
  Description of Artificial Sequence: Synthetic peptide
MEFGLSWLFLVAILKGVQCSR

SEQ ID NO: 164 - DNA, 327 bp, Artificial Sequence
  Description of Artificial Sequence: Synthetic polynucleotide
gacatccaattgacacaatcacacaaatttctctcaacttctgtaggagacagagtgagcataacctgcaaagcatcccaggacgtgtacaatgctgtggcttggtaccaacagaagcctggacaatccccaaaattgctgatttattctgcctctagtaggtacactggggtaccttctcggtttacgggctctgggtccggaccagatttcacgttcacaatcagttccgttcaagctgaagacctcgctgtttatttttgccagcagcacttccgaaccccttttacttttggctcaggcactaagttggaaatcaaggctttg

SEQ ID NO: 165 - protein, 109 aa, Artificial Sequence
  Description of Artificial Sequence: Synthetic polypeptide
DIQLTQSHKFLSTSVGDRVSITCKASQDVYNAVAWYQQKPGQSPKLLIYSASSRYTGVPSRFTGSGSGPDFTFTISSVQAEDLAVYFCQQHFRTPFTFGSGTKLEIKAL

SEQ ID NO: 166 - DNA, 24 bp, Artificial Sequence
  Description of Artificial Sequence: Synthetic oligonucleotide
ggcggaggaagcggaggtgggggc

SEQ ID NO: 167 - protein, 8 aa, Artificial Sequence
  Description of Artificial Sequence: Synthetic peptide
GGGSGGGG

SEQ ID NO: 168 - DNA, 357 bp, Artificial Sequence
  Description of Artificial Sequence: Synthetic polynucleotide
gaagtccaattgcaacagtcaggccccgaattgaaaaagcccggcgaaacagtgaagatatcttgtaaagcctccggttacccttttacgaactatggaatgaactgggtcaaacaagcccctggacagggattgaagtggatgggatggatcaatacatcaacaggcgagtctaccttcgcagatgatttcaaaggtcgctttgacttctcactggagaccagtgcaaataccgcctaccttcagattaacaatcttaaaagcgaggatatggcaacctacttttgcgcaagatgggaagtttatcacgggtacgtgccatactggggacaaggaacgacagtgacagttagtagc

SEQ ID NO: 169 - protein, 119 aa, Artificial Sequence
  Description of Artificial Sequence: Synthetic polypeptide
EVQLQQSGPELKKPGETVKISCKASGYPFTNYGMNWVKQAPGQGLKWMGWINTSTGESTFADDFKGRFDFSLETSANTAYLQINNLKSEDMATYFCARWEVYHGYVPYWGQGTTVTVSS

SEQ ID NO: 170 - DNA, 6 bp, Artificial Sequence
  Description of Artificial Sequence: Synthetic oligonucleotide
ggatcc

SEQ ID NO: 171 - protein, 2 aa, Artificial Sequence
  Description of Artificial Sequence: Synthetic peptide
GS

SEQ ID NO: 172 - DNA, 48 bp, Artificial Sequence; identical to SEQ ID NO: 152
  Description of Artificial Sequence: Synthetic oligonucleotide

SEQ ID NO: 173 - protein, 16 aa, Artificial Sequence
  Description of Artificial Sequence: Synthetic peptide
ELPTQGTFSNVSTNVS

SEQ ID NO: 174 - DNA, 126 bp, Artificial Sequence; identical to SEQ ID NO: 154
  Description of Artificial Sequence: Synthetic polynucleotide

SEQ ID NO: 175 - protein, 42 aa, Artificial Sequence; identical to SEQ ID NO: 155
  Description of Artificial Sequence: Synthetic polypeptide

SEQ ID NO: 176 - DNA, 111 bp, Artificial Sequence; identical to SEQ ID NO: 156
  Description of Artificial Sequence: Synthetic polynucleotide

SEQ ID NO: 177 - protein, 37 aa, Artificial Sequence; identical to SEQ ID NO: 157
  Description of Artificial Sequence: Synthetic polypeptide

SEQ ID NO: 178 - DNA, 6 bp, Artificial Sequence
  Description of Artificial Sequence: Synthetic oligonucleotide
ctcgag

SEQ ID NO: 179 - protein, 2 aa, Artificial Sequence
  Description of Artificial Sequence: Synthetic peptide
LE

SEQ ID NO: 180 - DNA, 336 bp, Artificial Sequence; identical to SEQ ID NO: 160
  Description of Artificial Sequence: Synthetic polynucleotide

SEQ ID NO: 181 - protein, 112 aa, Artificial Sequence; identical to SEQ ID NO: 161
  Description of Artificial Sequence: Synthetic polypeptide

SEQ ID NO: 182 - DNA, 204 bp, Artificial Sequence
  Description of Artificial Sequence: Synthetic polynucleotide
ttctgggtactggttgtagtcggtggcgtacttgcttgttattctcttcttgttaccgtagccttcattatattctgggtccgatcaaagcgctcaagactcctccattccgattatatgaacatgacacctcgccgacctggtcctacacgcaaacattatcaaccctacgcacccccccgagacttcgctgcttatcgatcc

SEQ ID NO: 183 - protein, 68 aa, Artificial Sequence
  Description of Artificial Sequence: Synthetic polypeptide
FWVLVVVGGVLACYSLLVTVAFIIFWVRSKRSRLLHSDYMNMTPRRPGPTRKHYQPYAPPRDFAAYRS

SEQ ID NO: 184 - DNA, 186 bp, Artificial Sequence
  Description of Artificial Sequence: Synthetic polynucleotide
gttgccgccatcctgggcctgggcctggtgctggggctgctgggccccctggccatcctgctggccctgtacctgctccgggaccagaggctgccccccgatgcccacaagccccctgggggaggcagtttccggacccccatccaagaggagcaggccgacgcccactccaccctggccaagatc

SEQ ID NO: 185 - protein, 63 aa, Artificial Sequence
  Description of Artificial Sequence: Synthetic polypeptide
VAAILGLGLVLGLLGPLAILLALYLLRRDQRLPPDAHKPPGGGSFRTPIQEEQADAHSTLAKI

SEQ ID NO: 186 - DNA, 135 bp, Artificial Sequence
  Description of Artificial Sequence: Synthetic polynucleotide
agtgtagttaaaagaggaagaaaaaagttgctgtatatatttaaacaaccatttatgagaccagtgcaaaccacccaagaagaagacggatgttcatgcagattcccagaagaagaagaaggaggatgtgaattg

SEQ ID NO: 187 - protein, 45 aa, Artificial Sequence
  Description of Artificial Sequence: Synthetic polypeptide
SVVKRGRKKLLYIFKQPFMRPVQTTQEEDGCSCRFPEEEEGGCEL

SEQ ID NO: 188 - protein, 288 aa, Artificial Sequence; identical to SEQ ID NO: 89
  Description of Artificial Sequence: Synthetic polypeptide

SEQ ID NO: 189 - DNA, 63 bp, Artificial Sequence; identical to SEQ ID NO: 142
  Description of Artificial Sequence: Synthetic oligonucleotide

SEQ ID NO: 190 - protein, 21 aa, Artificial Sequence
  Description of Artificial Sequence: Synthetic peptide
MEFGLSWLFLVAILKGVQCSR

SEQ ID NO: 191 - DNA, 318 bp, Artificial Sequence
  Description of Artificial Sequence: Synthetic polynucleotide
gacatccagctgacacaaagtcccagtagcctgtcagccagtgtcggcgatagggtgacaattacatgctccgcaagtagtagcgtcagattcatacactggtaccagcagaagcctgggaaggccccaaagaggcttatctacgataccagtaaactcgcctctggagttcctagccggttttctggatctggcagcggaactagctacaccctcacaatctccagtctgcaaccagaggactttgcaacctactactgccagcaatggagcagctcccctttcacctttgggcagggtactaaggtggagatcaag

SEQ ID NO: 192 - protein, 106 aa, Artificial Sequence
  Description of Artificial Sequence: Synthetic polypeptide
DIQLTQSPSSLSASVGDRVTITCSASSSVRFIHWYQQKPGKAPKRLIYDTSKLASGVPSRFSGSGSGTSYTLTISSLQPEDFATYYCQQWSSSPFTFGQGTKVEIK

SEQ ID NO: 193 - DNA, 24 bp, Artificial Sequence
  Description of Artificial Sequence: Synthetic oligonucleotide
ggcggaggaagcggaggtgggggc

SEQ ID NO: 194 - protein, 8 aa, Artificial Sequence
  Description of Artificial Sequence: Synthetic peptide
GGGSGGGG

SEQ ID NO: 195 - DNA, 336 bp, Artificial Sequence
  Description of Artificial Sequence: Synthetic polynucleotide
gaggtgcagcttgtagagagcgggggaggcctcgtacagccagggggctctctgcgcctgtcatgtgcagcttcaggattcaatataaaggactattacattcactgggtacggcaagctcccggtaagggcctggaatggatcggttggatcgaccctgaaaacggagatacagaatttgtgcccaagttccagggaaaggctaccatgtctgccgatacttctaagaatacagcataccttcagatgaattctctccgcgccgaggacacagccgtgtattattgtaaaacgggagggttctggggtcagggtacccttgtgactgtgtcttcc

SEQ ID NO: 196 - protein, 112 aa, Artificial Sequence
  Description of Artificial Sequence: Synthetic polypeptide
EVQLVESGGGLVQPGGSLRLSCAASGFNIKDYYIHWVRQAPGKGLEWIGWIDPENGDTEFVPKFQGKATMSADTSKNTAYLQMNSLRAEDTAVYYCKTGGFWGQGTLVTVSS

SEQ ID NO: 197 - DNA, 12 bp, Artificial Sequence
  Description of Artificial Sequence: Synthetic oligonucleotide
ggggatcccgcc

SEQ ID NO: 198 - protein, 4 aa, Artificial Sequence
  Description of Artificial Sequence: Synthetic peptide
GDPA

SEQ ID NO: 199 - DNA, 36 bp, Artificial Sequence
  Description of Artificial Sequence: Synthetic oligonucleotide
gagcccaaatctcctgacaaaactcacacatgccca

SEQ ID NO: 200 - protein, 12 aa, Artificial Sequence
  Description of Artificial Sequence: Synthetic peptide
EPKSPDKTHTCP

SEQ ID NO: 201 - DNA, 339 bp, Artificial Sequence
  Description of Artificial Sequence: Synthetic polynucleotide
ccgtgcccagcacctgaactcctggggggaccgtcagtcttcctcttccccccaaaacccaaagacaccctcatgatctcccggacccctgaggtcacatgcgtggtggtggacgtgagccacgaagaccctgaggtcaagttcaactggtatgtggacggcgtggaggtgcataatgcaaagacaaagccgcgggaggagcagtacaacagcacgtaccgtgtggtcagcgtcctcaccgtcctgcaccaggactggctgaatggcaaggagtacaagtgcaaggtctccaacaaagccctcccagcccccatcgagaaaaccatctccaaagccaaa

SEQ ID NO: 202 - protein, 113 aa, Artificial Sequence
  Description of Artificial Sequence: Synthetic polypeptide
PCPAPELLGGPSVFLFPPKPKDTLMISRTPEVTCVVVDVSHEDPEVKFNWYVDGVEVHNAKTKPREEQYNSTYRVVSVLTVLHQDWLNGKEYKCKVSNKALPAPIEKTISKAK

SEQ ID NO: 203 - DNA, 321 bp, Artificial Sequence
  Description of Artificial Sequence: Synthetic polynucleotide
gggcagccccgagaaccacaggtgtacaccctgcccccatcccgggatgagctgaccaagaaccaggtcagcctgacctgcctggtcaaaggcttctatcccagcgacatcgccgtggagtgggagagcaatgggcaaccggagaacaactacaagaccacgcctcccgtgctggactccgacggctccttcttcctctacagcaagctcaccgtggacaagagcaggtggcagcaggggaacgtcttctcatgctccgtgatgcatgaggctctgcacaaccactacacgcagaagagcctctccctgtctccgggtaaa

SEQ ID NO: 204 - protein, 107 aa, Artificial Sequence
  Description of Artificial Sequence: Synthetic polypeptide
GQPREPQVYTLPPSRDELTKNQVSLTCLVKGFYPSDIAVEWESNGQPENNYKTTPPVLDSDGSFFLYSKLTVDKSRWQQGNVFSCSVMHEALHNHYTQKSLSLSPGK

SEQ ID NO: 205 - DNA, 12 bp, Artificial Sequence
  Description of Artificial Sequence: Synthetic oligonucleotide
aaagatcccaaa

SEQ ID NO: 206 - protein, 4 aa, Artificial Sequence
  Description of Artificial Sequence: Synthetic peptide
KDPK

SEQ ID NO: 207 - DNA, 72 bp, Artificial Sequence
  Description of Artificial Sequence: Synthetic oligonucleotide
ttttgggtgctggtggtggttggtggagtcctggcttgctatagcttgctagtaacagtggcctttattatt

SEQ ID NO: 208 - protein, 24 aa, Artificial Sequence
  Description of Artificial Sequence: Synthetic peptide
FWVLVVVGGVLACYSLLVTVAFII

SEQ ID NO: 209 - DNA, 6 bp, Artificial Sequence
  Description of Artificial Sequence: Synthetic oligonucleotide
gccggc

SEQ ID NO: 210 - protein, 2 aa, Artificial Sequence
  Description of Artificial Sequence: Synthetic peptide
AG

SEQ ID NO: 211 - DNA, 336 bp, Artificial Sequence; identical to SEQ ID NO: 160
  Description of Artificial Sequence: Synthetic polynucleotide

SEQ ID NO: 212 - protein, 112 aa, Artificial Sequence; identical to SEQ ID NO: 161
  Description of Artificial Sequence: Synthetic polypeptide

SEQ ID NO: 213 - DNA, 513 bp, Artificial Sequence
  Description of Artificial Sequence: Synthetic polynucleotide
gccgctgggggcccaggcgccggatcagctgctcccgtatcttctacttcttctttgccgctggctgctctgaacatgcgcgtgagaagacgcctctccctgttccttaacgttcgcacacaagtcgctgccgattggaccgcccttgccgaagaaatggactttgaatacctggaaattagacaacttgaaacacaggccgaccccactggcagactcctggacgcatggcagggaagacctggtgcaagcgttggacggctcctggatctcctgacaaaactgggacgcgacgacgtactgcttgaactcggacctagcattgaagaagactgccaaaaatatatcctgaaacaacaacaagaagaagccgaaaaacctctccaagtcgcagcagtggactcatcagtaccccgaacagctgagcttgctgggattactacactcgacgacccactcggacatatgcctgaaagattcgacgctttcatttgctattgcccctctgacata

SEQ ID NO: 214 - protein, 171 aa, Artificial Sequence
  Description of Artificial Sequence: Synthetic polypeptide
AAGGPGAGSAAPVSSTSSLPLAALNMRVRRRLSLFLNVRTQVAADWTALAEEMDFEYLEIRQLETQADPTGRLLDAWQGRPGASVGRLLDLLTKLGRDDVLLELGPSIEEDCQKYILKQQQEEAEKPLQVAAVDSSVPRTAELAGITTLDDPLGHMPERFDAFICYCPSDI

SEQ ID NO: 215 - DNA, 189 bp, Artificial Sequence
  Description of Artificial Sequence: Synthetic polynucleotide
aagaaagttgcaaagaaacccacaaataaagccccacaccctaaacaggaaccccaagaaatcaatttcccagatgatctccctggatctaatactgccgccccggtccaagaaaccctgcatggttgccagcctgtcacccaagaggacggaaaagaatcacggattagcgtacaagagagacaatag

SEQ ID NO: 216 - protein, 62 aa, Artificial Sequence
  Description of Artificial Sequence: Synthetic polypeptide
KKVAKKPTNKAPHPKQEPQEINFPDDLPGSNTAAPVQETLHGCQPVTQEDGKESRISVQERQ

SEQ ID NO: 217 - DNA, 63 bp, Artificial Sequence; identical to SEQ ID NO: 142
  Description of Artificial Sequence: Synthetic oligonucleotide

SEQ ID NO: 218 - protein, 21 aa, Artificial Sequence
  Description of Artificial Sequence: Synthetic peptide
MEFGLSWLFLVAILKGVQCSR

SEQ ID NO: 219 - DNA, 321 bp, Artificial Sequence; identical to SEQ ID NO: 144
  Description of Artificial Sequence: Synthetic polynucleotide

SEQ ID NO: 220 - protein, 107 aa, Artificial Sequence; identical to SEQ ID NO: 145
  Description of Artificial Sequence: Synthetic polypeptide

SEQ ID NO: 221 - DNA, 24 bp, Artificial Sequence
  Description of Artificial Sequence: Synthetic oligonucleotide
ggcggaggaagcggaggtgggggc

SEQ ID NO: 222 - protein, 8 aa, Artificial Sequence
  Description of Artificial Sequence: Synthetic peptide
GGGSGGGG

SEQ ID NO: 223 - DNA, 360 bp, Artificial Sequence; identical to SEQ ID NO: 148
  Description of Artificial Sequence: Synthetic polynucleotide

SEQ ID NO: 224 - protein, 120 aa, Artificial Sequence; identical to SEQ ID NO: 149
  Description of Artificial Sequence: Synthetic polypeptide

SEQ ID NO: 225 - DNA, 12 bp, Artificial Sequence
  Description of Artificial Sequence: Synthetic oligonucleotide
ggggatcccgcc

SEQ ID NO: 226 - protein, 4 aa, Artificial Sequence
  Description of Artificial Sequence: Synthetic peptide
GDPA

SEQ ID NO: 227 - DNA, 36 bp, Artificial Sequence; identical to SEQ ID NO: 199
  Description of Artificial Sequence: Synthetic oligonucleotide

SEQ ID NO: 228 - protein, 12 aa, Artificial Sequence
  Description of Artificial Sequence: Synthetic peptide
EPKSPDKTHTCP

SEQ ID NO: 229 - DNA, 339 bp, Artificial Sequence; identical to SEQ ID NO: 201
  Description of Artificial Sequence: Synthetic polynucleotide

SEQ ID NO: 230 - protein, 113 aa, Artificial Sequence; identical to SEQ ID NO: 202
  Description of Artificial Sequence: Synthetic polypeptide

SEQ ID NO: 231 - DNA, 321 bp, Artificial Sequence; identical to SEQ ID NO: 203
  Description of Artificial Sequence: Synthetic polynucleotide

SEQ ID NO: 232 - protein, 107 aa, Artificial Sequence; identical to SEQ ID NO: 204
  Description of Artificial Sequence: Synthetic polypeptide

SEQ ID NO: 233 - DNA, 12 bp, Artificial Sequence
  Description of Artificial Sequence: Synthetic oligonucleotide
aaagatcccaaa

SEQ ID NO: 234 - protein, 4 aa, Artificial Sequence
  Description of Artificial Sequence: Synthetic peptide
KDPK

SEQ ID NO: 235 - DNA, 72 bp, Artificial Sequence; identical to SEQ ID NO: 207
  Description of Artificial Sequence: Synthetic oligonucleotide

SEQ ID NO: 236 - protein, 24 aa, Artificial Sequence
  Description of Artificial Sequence: Synthetic peptide
FWVLVVVGGVLACYSLLVTVAFII

SEQ ID NO: 237 - DNA, 6 bp, Artificial Sequence
  Description of Artificial Sequence: Synthetic oligonucleotide
ctcgag

SEQ ID NO: 238 - protein, 2 aa, Artificial Sequence
  Description of Artificial Sequence: Synthetic peptide
LE

SEQ ID NO: 239 - DNA, 516 bp, Artificial Sequence
  Description of Artificial Sequence: Synthetic polynucleotide
atggccgctgggggcccaggcgccggatcagctgctcccgtatcttctacttcttctttgccgctggctgctctgaacatgcgcgtgagaagacgcctctccctgttccttaacgttcgcacacaagtcgctgccgattggaccgcccttgccgaagaaatggactttgaatacctggaaattagacaacttgaaacacaggccgaccccactggcagactcctggacgcatggcagggaagacctggtgcaagcgttggacggctcctggatctcctgacaaaactgggacgcgacgacgtactgcttgaactcggacctagcattgaagaagactgccaaaaatatatcctgaaacaacaacaagaagaagccgaaaaacctctccaagtcgcagcagtggactcatcagtaccccgaacagctgagcttgctgggattactacactcgacgacccactcggacatatgcctgaaagattcgacgctttcatttgctattgcccctctgacata

SEQ ID NO: 240 - protein, 172 aa, Artificial Sequence
  Description of Artificial Sequence: Synthetic polypeptide
MAAGGPGAGSAAPVSSTSSLPLAALNMRVRRRLSLFLNVRTQVAADWTALAEEMDFEYLEIRQLETQADPTGRLLDAWQGRPGASVGRLLDLLTKLGRDDVLLELGPSIEEDCQKYILKQQQEEAEKPLQVAAVDSSVPRTAELAGITTLDDPLGHMPERFDAFICYCPSDI

SEQ ID NO: 241 - DNA, 186 bp, Artificial Sequence
  Description of Artificial Sequence: Synthetic polynucleotide
aagaaagttgcaaagaaacccacaaataaagccccacaccctaaacaggaaccccaagaaatcaatttcccagatgatctccctggatctaatactgccgccccggtccaagaaaccctgcatggttgccagcctgtcacccaagaggacggaaaagaatcacggattagcgtacaagagagacaa

SEQ ID NO: 242 - protein, 62 aa, Artificial Sequence; identical to SEQ ID NO: 216
  Description of Artificial Sequence: Synthetic polypeptide

SEQ ID NO: 243 - DNA, 15 bp, Artificial Sequence
  Description of Artificial Sequence: Synthetic oligonucleotide
gcggccgcagtcgag

SEQ ID NO: 244 - protein, 5 aa, Artificial Sequence
  Description of Artificial Sequence: Synthetic peptide
AAAVE

SEQ ID NO: 245 - DNA, 339 bp, Artificial Sequence
  Description of Artificial Sequence: Synthetic polynucleotide
agagtgaagttcagcaggagcgcagacgcccccgcgtaccagcagggccagaaccagctctataacgagctcaatctaggacgaagagaggagtacgatgttttggacaagagacgtggccgggaccctgagatggggggaaagccgagaaggaagaaccctcaggaaggcctgtacaatgaactgcagaaagataagatggcggaggcctacagtgagattgggatgaaaggcgagcgccggaggggcaaggggcacgatggcctttaccagggtctcagtacagccaccaaggacacctacgacgcccttcacatgcaggccctgccccctcgctaa

SEQ ID NO: 246 - protein, 112 aa, Artificial Sequence; identical to SEQ ID NO: 161
  Description of Artificial Sequence: Synthetic polypeptide

SEQ ID NO: 247 - DNA, 42 bp, Artificial Sequence
  Description of Artificial Sequence: Synthetic oligonucleotide
atggggagtagcaagagcaagcctaaggaccccagccagcgc

SEQ ID NO: 248 - protein, 14 aa, Artificial Sequence
  Description of Artificial Sequence: Synthetic peptide
MGSSKSKPKDPSQR

SEQ ID NO: 249 - DNA, 6 bp, Artificial Sequence
  Description of Artificial Sequence: Synthetic oligonucleotide
ctcgac

SEQ ID NO: 250 - protein, 2 aa, Artificial Sequence
  Description of Artificial Sequence: Synthetic peptide
LD

SEQ ID NO: 251 - DNA, 516 bp, Artificial Sequence
  Description of Artificial Sequence: Synthetic polynucleotide
atggctgcaggaggtcccggcgcggggtctgcggccccggtctcctccacatcctcccttcccctggctgctctcaacatgcgagtgcggcgccgcctgtctctgttcttgaacgtgcggacacaggtggcggccgactggaccgcgctggcggaggagatggactttgagtacttggagatccggcaactggagacacaagcggaccccactggcaggctgctggacgcctggcagggacgccctggcgcctctgtaggccgactgctcgatctgcttaccaagctgggccgcgacgacgtgctgctggagctgggacccagcattgaggaggattgccaaaagtatatcttgaagcagcagcaggaggaggctgagaagcctttacaggtggccgctgtagacagcagtgtcccacggacagcagagctggcgggcatcaccacacttgatgaccccctggggcatatgcctgagcgtttcgatgccttcatctgctattgccccagcgacatc

SEQ ID NO: 252 - protein, 172 aa, Artificial Sequence; identical to SEQ ID NO: 240
  Description of Artificial Sequence: Synthetic polypeptide

SEQ ID NO: 253 - DNA, 6 bp, Artificial Sequence
  Description of Artificial Sequence: Synthetic oligonucleotide
gtcgag

SEQ ID NO: 254 - protein, 2 aa, Artificial Sequence
  Description of Artificial Sequence: Synthetic peptide
VE

SEQ ID NO: 255 - DNA, 186 bp, Artificial Sequence
  Description of Artificial Sequence: Synthetic polynucleotide
aaaaaggtggccaagaagccaaccaataaggccccccaccccaagcaggagccccaggagatcaattttcccgacgatcttcctggctccaacactgctgctccagtgcaggagactttacatggatgccaaccggtcacccaggaggatggcaaagagagtcgcatctcagtgcaggagagacag

SEQ ID NO: 256 - protein, 62 aa, Artificial Sequence; identical to SEQ ID NO: 216
  Description of Artificial Sequence: Synthetic polypeptide

SEQ ID NO: 257 - DNA, 6 bp, Artificial Sequence
  Description of Artificial Sequence: Synthetic oligonucleotide
ccgcgg

SEQ ID NO: 258 - protein, 2 aa, Artificial Sequence
  Description of Artificial Sequence: Synthetic peptide
PR

SEQ ID NO: 259 - DNA, 54 bp, Artificial Sequence; identical to SEQ ID NO: 138
  Description of Artificial Sequence: Synthetic oligonucleotide

SEQ ID NO: 260 - protein, 18 aa, Artificial Sequence
  Description of Artificial Sequence: Synthetic peptide
EGRGSLLTCGDVEENPGP

SEQ ID NO: 261 - DNA, 63 bp, Artificial Sequence; identical to SEQ ID NO: 142
  Description of Artificial Sequence: Synthetic oligonucleotide

SEQ ID NO: 262 - protein, 21 aa, Artificial Sequence
  Description of Artificial Sequence: Synthetic peptide
MEFGLSWLFLVAILKGVQCSR

SEQ ID NO: 263 - DNA, 321 bp, Artificial Sequence; identical to SEQ ID NO: 144
  Description of Artificial Sequence: Synthetic polynucleotide

SEQ ID NO: 264 - protein, 107 aa, Artificial Sequence; identical to SEQ ID NO: 145
  Description of Artificial Sequence: Synthetic polypeptide

SEQ ID NO: 265 - DNA, 24 bp, Artificial Sequence
  Description of Artificial Sequence: Synthetic oligonucleotide
ggcggaggaagcggaggtgggggc

SEQ ID NO: 266 - protein, 8 aa, Artificial Sequence
  Description of Artificial Sequence: Synthetic peptide
GGGSGGGG

SEQ ID NO: 267 - DNA, 360 bp, Artificial Sequence; identical to SEQ ID NO: 148
  Description of Artificial Sequence: Synthetic polynucleotide

SEQ ID NO: 268 - protein, 120 aa, Artificial Sequence; identical to SEQ ID NO: 149
  Description of Artificial Sequence: Synthetic polypeptide

SEQ ID NO: 269 - DNA, 6 bp, Artificial Sequence
  Description of Artificial Sequence: Synthetic oligonucleotide
ggatcc

SEQ ID NO: 270 - protein, 2 aa, Artificial Sequence
  Description of Artificial Sequence: Synthetic peptide
GS

SEQ ID NO: 271 - DNA, 48 bp, Artificial Sequence; identical to SEQ ID NO: 152
  Description of Artificial Sequence: Synthetic oligonucleotide

SEQ ID NO: 272 - protein, 16 aa, Artificial Sequence
  Description of Artificial Sequence: Synthetic peptide
ELPTQGTFSNVSTNVS

SEQ ID NO: 273 - DNA, 126 bp, Artificial Sequence; identical to SEQ ID NO: 154
  Description of Artificial Sequence: Synthetic polynucleotide

SEQ ID NO: 274 - protein, 42 aa, Artificial Sequence; identical to SEQ ID NO: 155
  Description of Artificial Sequence: Synthetic polypeptide

SEQ ID NO: 275 - DNA, 111 bp, Artificial Sequence; identical to SEQ ID NO: 156
  Description of Artificial Sequence: Synthetic polynucleotide

SEQ ID NO: 276 - protein, 37 aa, Artificial Sequence; identical to SEQ ID NO: 157
  Description of Artificial Sequence: Synthetic polypeptide

SEQ ID NO: 277 - DNA, 6 bp, Artificial Sequence
  Description of Artificial Sequence: Synthetic oligonucleotide
gtcgac

SEQ ID NO: 278 - protein, 2 aa, Artificial Sequence
  Description of Artificial Sequence: Synthetic peptide
VD

SEQ ID NO: 279 - DNA, 336 bp, Artificial Sequence; identical to SEQ ID NO: 160
  Description of Artificial Sequence: Synthetic polynucleotide

SEQ ID NO: 280 - protein, 112 aa, Artificial Sequence; identical to SEQ ID NO: 161
  Description of Artificial Sequence: Synthetic polypeptide

SEQ ID NO: 281 - DNA, 888 bp, Artificial Sequence
  Description of Artificial Sequence: Synthetic polynucleotide
atggctgcaggaggtcccggcgcggggtctgcggccccggtctcctccacatcctcccttcccctggctgctctcaacatgcgagtgcggcgccgcctgtctctgttcttgaacgtgcggacacaggtggcggccgactggaccgcgctggcggaggagatggactttgagtacttggagatccggcaactggagacacaagcggaccccactggcaggctgctggacgcctggcagggacgccctggcgcctctgtaggccgactgctcgagctgcttaccaagctgggccgcgacgacgtgctgctggagctgggacccagcattgaggaggattgccaaaagtatatcttgaagcagcagcaggaggaggctgagaagcctttacaggtggccgctgtagacagcagtgtcccacggacagcagagctggcgggcatcaccacacttgatgaccccctggggcatatgcctgagcgtttcgatgccttcatctgctattgccccagcgacatccagtttgtgcaggagatgatccggcaactggaacagacaaactatcgactgaagttgtgtgtgtctgaccgcgatgtcctgcctggcacctgtgtctggtctattgctagtgagctcatcgaaaagaggtgccgccggatggtggtggttgtctctgatgattacctgcagagcaaggaatgtgacttccagaccaaatttgcactcagcctctctccaggtgcccatcagaagcgactgatccccatcaagtacaaggcaatgaagaaagagttccccagcatcctgaggttcatcactgtctgcgactacaccaacccctgcaccaaatcttggttctggactcgccttgccaaggccttgtccctgccc

SEQ ID NO: 282 - protein, 296 aa, Artificial Sequence
  Description of Artificial Sequence: Synthetic polypeptide
MAAGGPGAGSAAPVSSTSSLPLAALNMRVRRRLSLFLNVRTQVAADWTALAEEMDFEYLEIRQLETQADPTGRLLDAWQGRPGASVGRLLELLTKLGRDDVLLELGPSIEEDCQKYILKQQQEEAEKPLQVAAVDSSVPRTAELAGITTLDDPLGHMPERFDAFICYCPSDIQFVQEMIRQLEQTNYRLKLCVSDRDVLPGTCVWSIASELIEKRCRRMVVVVSDDYLQSKECDFQTKFALSLSPGAHQKRLIPIKYKAMKKEFPSILRFITVCDYTNPCTKSWFWTRLAKALSLP

SEQ ID NO: 283 - protein, 16 aa, Homo sapiens
MGSNKSKPKDASQRRR

SEQ ID NO: 284 - protein, 5 aa, Artificial Sequence
  Description of Artificial Sequence: Synthetic peptide
  MOD_RES (4)..(4): Any amino acid
MGCXC

SEQ ID NO: 285 - protein, 6 aa, Artificial Sequence
  Description of Artificial Sequence: Synthetic peptide
GSGGGS

SEQ ID NO: 286 - protein, 5 aa, Artificial Sequence
  Description of Artificial Sequence: Synthetic peptide
SGGGS

SEQ ID NO: 287 - protein, 8 aa, Artificial Sequence
  Description of Artificial Sequence: Synthetic peptide
RAKFKQLL

SEQ ID NO: 288 - protein, 9 aa, Artificial Sequence
  Description of Artificial Sequence: Synthetic peptide
NLVPMVATV

SEQ ID NO: 289 - protein, 6 aa, Artificial Sequence
  Description of Artificial Sequence: Synthetic peptide
SGGGSG

SEQ ID NO: 290 - protein, 7 aa, Homo sapiens
TDPTRRF

SEQ ID NO: 291 - DNA, 18 bp, Artificial Sequence
  Description of Artificial Sequence: Synthetic primer
tccgccctgagcaaagac

SEQ ID NO: 292 - DNA, 20 bp, Artificial Sequence
  Description of Artificial Sequence: Synthetic primer
acgaactccagcaggaccat

SEQ ID NO: 293 - DNA, 15 bp, Artificial Sequence
  Description of Artificial Sequence: Synthetic probe
acgagaagcgcgatc

SEQ ID NO: 294 - DNA, 19 bp, Artificial Sequence
  Description of Artificial Sequence: Synthetic primer
ctggaatctggcggtggat

SEQ ID NO: 295 - DNA, 23 bp, Artificial Sequence
  Description of Artificial Sequence: Synthetic primer
caaactctcaagagcaccgacat

SEQ ID NO: 296 - DNA, 15 bp, Artificial Sequence
  Description of Artificial Sequence: Synthetic probe
cggagtcgacggatt

SEQ ID NO: 297 - protein, 5 aa, Homo sapiens
GCFNF

SEQ ID NO: 298 - protein, 5 aa, Artificial Sequence
  Description of Artificial Sequence: Synthetic peptide
CIVSM

SEQ ID NO: 299 - protein, 4 aa, Homo sapiens
ATPF

SEQ ID NO: 300 - protein, 288 aa, Artificial Sequence; identical to SEQ ID NO: 45
  Description of Artificial Sequence: Synthetic polypeptide

SEQ ID NO: 301 - protein, 5 aa, Artificial Sequence
  Description of Artificial Sequence: Synthetic peptide
DAISS

SEQ ID NO: 302 - protein, 5 aa, Artificial Sequence
  Description of Artificial Sequence: Synthetic peptide
AAAAA

SEQ ID NO: 303 - protein, 5 aa, Artificial Sequence
  Description of Artificial Sequence: Synthetic peptide
ISAQT

SEQ ID NO: 304 - protein, 4 aa, Artificial Sequence
  Description of Artificial Sequence: Synthetic peptide
AVPI

SEQ ID NO: 305 - protein, 5 aa, Artificial Sequence
  Description of Artificial Sequence: Synthetic peptide
YCSTL

SEQ ID NO: 306 - protein, 5 aa, Artificial Sequence
  Description of Artificial Sequence: Synthetic peptide
CIVSM

SEQ ID NO: 307 - protein, 5 aa, Artificial Sequence
  Description of Artificial Sequence: Synthetic peptide
QPTFT

SEQ ID NO: 308 - DNA, 54 bp, Artificial Sequence; identical to SEQ ID NO: 138
  Description of Artificial Sequence: Synthetic oligonucleotide

SEQ ID NO: 309 - DNA, 1002 bp, Artificial Sequence
  Description of Artificial Sequence: Synthetic polynucleotide
atgccaccacctcgcctgctgttctttctgctgttcctgacacctatggaggtgcgacctgaggaaccactggtcgtgaaggtcgaggaaggcgacaatgccgtgctgcagtgcctgaaaggcacttctgatgggccaactcagcagctgacctggtccagggagtctcccctgaagccttttctgaaactgagcctgggactgccaggactgggaatccacatgcgccctctggctatctggctgttcatcttcaacgtgagccagcagatgggaggattctacctgtgccagccaggaccaccatccgagaaggcctggcagcctggatggaccgtcaacgtggaggggtctggagaactgtttaggtggaatgtgagtgacctgggaggactgggatgtgggctgaagaaccgctcctctgaaggcccaagttcaccctcagggaagctgatgagcccaaaactgtacgtgtgggccaaagatcggcccgagatctgggagggagaacctccatgcctgccacctagagacagcctgaatcagagtctgtcacaggatctgacaatggcccccgggtccactctgtggctgtcttgtggagtcccacccgacagcgtgtccagaggccctctgtcctggacccacgtgcatcctaaggggccaaaaagtctgctgtcactggaactgaaggacgatcggcctgccagagacatgtgggtcatggagactggactgctgctgccacgagcaaccgcacaggatgctggaaaatactattgccaccggggcaatctgacaatgtccttccatctggagatcactgcaaggcccgtgctgtggcactggctgctgcgaaccggaggatggaaggtcagtgctgtgacactggcatatctgatcttttgcctgtgctccctggtgggcattctgcatctgcagagagccctggtgctgcggagaaagagaaagagaatgactgacccaacaagaaggttttga

SEQ ID NO: 310 - protein, 333 aa, Artificial Sequence; identical to SEQ ID NO: 15
  Description of Artificial Sequence: Synthetic polypeptide

SEQ ID NO: 311 - DNA, 329 bp, Artificial Sequence
  Description of Artificial Sequence: Synthetic polynucleotide
atgctcgagggagtgcaggtggagactatctccccaggagacgggcgcaccttccccaagcgcggccagacctgcgtggtgcactacaccgggatgcttgaagatggaaagaaagttgattcctcccgggacagaaacaagccctttaagtttatgctaggcaagcaggaggtgatccgaggctgggaagaaggggttgcccagatgagtgtgggtcagagagccaaactgactatatctccagattatgcctatggtgccactgggcacccaggcatcatcccaccacatgccactctcgtcttcgatgtggagcttctaaaactgga

SEQ ID NO: 312 - DNA, 18 bp, Artificial Sequence
  Description of Artificial Sequence: Synthetic oligonucleotide
tctggcggtggatccgga

SEQ ID NO: 313 - DNA, 54 bp, Artificial Sequence
  Description of Artificial Sequence: Synthetic oligonucleotide
gagggcaggggaagtcttctaacatgcggggacgtggaggaaaatcccgggccc

SEQ ID NO: 314 - protein, 110 aa, Artificial Sequence; identical to SEQ ID NO: 36
  Description of Artificial Sequence: Synthetic polypeptide

SEQ ID NO: 315 - protein, 6 aa, Artificial Sequence
  Description of Artificial Sequence: Synthetic peptide
SGGGSG

SEQ ID NO: 316 - protein, 18 aa, Artificial Sequence
  Description of Artificial Sequence: Synthetic peptide
EGRGSLLTCGDVEENPGP

SEQ ID NO: 317 - DNA, 321 bp, Artificial Sequence
  Description of Artificial Sequence: Synthetic polynucleotide
ggagtgcaggtggagactattagccccggagatggcagaacattccccaaaagaggacagacttgcgtcgtgcattatactggaatgctggaagacggcaagaaggtggacagcagccgggaccgaaacaagcccttcaagttcatgctggggaagcaggaagtgatccggggctgggaggaaggagtcgcacagatgtcagtgggacagagggccaaactgactattagcccagactacgcttatggagcaaccggccaccccgggatcattccccctcatgctacactggtcttcgatgtggagctgctgaagctggaa

SEQ ID NO: 318 - DNA, 18 bp, Artificial Sequence
  Description of Artificial Sequence: Synthetic oligonucleotide
agcggaggaggatccgga

SEQ ID NO: 319 - DNA, 60 bp, Artificial Sequence
  Description of Artificial Sequence: Synthetic oligonucleotide
ccgcgggaaggccgagggagcctgctgacatgtggcgatgtggaggaaaacccaggacca

SEQ ID NO: 320 - protein, 18 aa, Artificial Sequence
  Description of Artificial Sequence: Synthetic peptide
EGRGSLLTCGDVEENPGP

SEQ ID NO: 321 - DNA, 330 bp, Artificial Sequence; identical to SEQ ID NO: 35
  Description of Artificial Sequence: Synthetic polynucleotide

SEQ ID NO: 322 - protein, 110 aa, Artificial Sequence; identical to SEQ ID NO: 36
  Description of Artificial Sequence: Synthetic polypeptide

SEQ ID NO: 323 - DNA, 18 bp, Artificial Sequence
  Description of Artificial Sequence: Synthetic oligonucleotide
agcggaggaggatccgga

SEQ ID NO: 324 - protein, 6 aa, Artificial Sequence
  Description of Artificial Sequence: Synthetic peptide
SGGGSG

SEQ ID NO: 325 - DNA, 864 bp, Artificial Sequence; identical to SEQ ID NO: 46
  Description of Artificial Sequence: Synthetic polynucleotide

SEQ ID NO: 326 - protein, 288 aa, Artificial Sequence; identical to SEQ ID NO: 45
  Description of Artificial Sequence: Synthetic polypeptide

SEQ ID NO: 327 - DNA, 6 bp, Artificial Sequence
  Description of Artificial Sequence: Synthetic oligonucleotide
ccgcgg

SEQ ID NO: 328 - protein, 2 aa, Artificial Sequence
  Description of Artificial Sequence: Synthetic peptide
PR

SEQ ID NO: 329 - DNA, 54 bp, Artificial Sequence; identical to SEQ ID NO: 138
  Description of Artificial Sequence: Synthetic oligonucleotide

SEQ ID NO: 330 - protein, 18 aa, Artificial Sequence
  Description of Artificial Sequence: Synthetic peptide
EGRGSLLTCGDVEENPGP

SEQ ID NO: 331 - DNA, 6 bp, Artificial Sequence
  Description of Artificial Sequence: Synthetic oligonucleotide
ccatgg

SEQ ID NO: 332 - protein, 2 aa, Artificial Sequence
  Description of Artificial Sequence: Synthetic peptide
PW

SEQ ID NO: 333 - DNA, 63 bp, Artificial Sequence; identical to SEQ ID NO: 142
  Description of Artificial Sequence: Synthetic oligonucleotide

SEQ ID NO: 334 - protein, 21 aa, Artificial Sequence
  Description of Artificial Sequence: Synthetic peptide
MEFGLSWLFLVAILKGVQCSR

SEQ ID NO: 335 - DNA, 321 bp, Artificial Sequence; identical to SEQ ID NO: 144
  Description of Artificial Sequence: Synthetic polynucleotide

SEQ ID NO: 336 - protein, 107 aa, Artificial Sequence; identical to SEQ ID NO: 145
  Description of Artificial Sequence: Synthetic polypeptide

SEQ ID NO: 337 - DNA, 24 bp, Artificial Sequence
  Description of Artificial Sequence: Synthetic oligonucleotide
ggcggaggaagcggaggtgggggc

SEQ ID NO: 338 - protein, 8 aa, Artificial Sequence
  Description of Artificial Sequence: Synthetic peptide
GGGSGGGG

SEQ ID NO: 339 - DNA, 360 bp, Artificial Sequence; identical to SEQ ID NO: 148
  Description of Artificial Sequence: Synthetic polynucleotide

SEQ ID NO: 340 - protein, 120 aa, Artificial Sequence; identical to SEQ ID NO: 149
  Description of Artificial Sequence: Synthetic polypeptide

SEQ ID NO: 341 - DNA, 6 bp, Artificial Sequence
  Description of Artificial Sequence: Synthetic oligonucleotide
ggatcc

SEQ ID NO: 342 - protein, 2 aa, Artificial Sequence
  Description of Artificial Sequence: Synthetic peptide
GS

SEQ ID NO: 343 - DNA, 48 bp, Artificial Sequence; identical to SEQ ID NO: 152
  Description of Artificial Sequence: Synthetic oligonucleotide

SEQ ID NO: 344 - protein, 16 aa, Artificial Sequence
  Description of Artificial Sequence: Synthetic peptide
ELPTQGTFSNVSTNVS

SEQ ID NO: 345 - DNA, 126 bp, Artificial Sequence; identical to SEQ ID NO: 154
  Description of Artificial Sequence: Synthetic polynucleotide

SEQ ID NO: 346 - protein, 42 aa, Artificial Sequence; identical to SEQ ID NO: 155
  Description of Artificial Sequence: Synthetic polypeptide

SEQ ID NO: 347 - DNA, 111 bp, Artificial Sequence; identical to SEQ ID NO: 156
  Description of Artificial Sequence: Synthetic polynucleotide

SEQ ID NO: 348 - protein, 37 aa, Artificial Sequence; identical to SEQ ID NO: 157
  Description of Artificial Sequence: Synthetic polypeptide

SEQ ID NO: 349 - DNA, 6 bp, Artificial Sequence
  Description of Artificial Sequence: Synthetic oligonucleotide
gtcgac

SEQ ID NO: 350 - protein, 2 aa, Artificial Sequence
  Description of Artificial Sequence: Synthetic peptide
VD

SEQ ID NO: 351 - DNA, 516 bp, Artificial Sequence; identical to SEQ ID NO: 239
  Description of Artificial Sequence: Synthetic polynucleotide

SEQ ID NO: 352 - protein, 172 aa, Artificial Sequence; identical to SEQ ID NO: 240
  Description of Artificial Sequence: Synthetic polypeptide

SEQ ID NO: 353 - DNA, 186 bp, Artificial Sequence; identical to SEQ ID NO: 241
  Description of Artificial Sequence: Synthetic polynucleotide

SEQ ID NO: 354 - protein, 62 aa, Artificial Sequence; identical to SEQ ID NO: 216
  Description of Artificial Sequence: Synthetic polypeptide

SEQ ID NO: 355 - DNA, 336 bp, Artificial Sequence; identical to SEQ ID NO: 160
  Description of Artificial Sequence: Synthetic polynucleotide

SEQ ID NO: 356 - protein, 112 aa, Artificial Sequence; identical to SEQ ID NO: 161
  Description of Artificial Sequence: Synthetic polypeptide

SEQ ID NO: 357 - DNA, 63 bp, Artificial Sequence; identical to SEQ ID NO: 142
  Description of Artificial Sequence: Synthetic oligonucleotide

SEQ ID NO: 358 - protein, 21 aa, Artificial Sequence
  Description of Artificial Sequence: Synthetic peptide
MEFGLSWLFLVAILKGVQCSR

SEQ ID NO: 359 - DNA, 327 bp, Artificial Sequence; identical to SEQ ID NO: 164
  Description of Artificial Sequence: Synthetic polynucleotide

SEQ ID NO: 360 - protein, 109 aa, Artificial Sequence; identical to SEQ ID NO: 165
  Description of Artificial Sequence: Synthetic polypeptide

SEQ ID NO: 361 - DNA, 24 bp, Artificial Sequence
  Description of Artificial Sequence: Synthetic oligonucleotide
ggcggaggaagcggaggtgggggc

SEQ ID NO: 362 - protein, 8 aa, Artificial Sequence
  Description of Artificial Sequence: Synthetic peptide
GGGSGGGG

SEQ ID NO: 363 - DNA, 357 bp, Artificial Sequence; identical to SEQ ID NO: 168
  Description of Artificial Sequence: Synthetic polynucleotide

SEQ ID NO: 364 - protein, 119 aa, Artificial Sequence; identical to SEQ ID NO: 169
  Description of Artificial Sequence: Synthetic polypeptide

SEQ ID NO: 365 - DNA, 6 bp, Artificial Sequence
  Description of Artificial Sequence: Synthetic oligonucleotide
ggatcc

SEQ ID NO: 366 - protein, 2 aa, Artificial Sequence
  Description of Artificial Sequence: Synthetic peptide
GS

SEQ ID NO: 367 - DNA, 48 bp, Artificial Sequence; identical to SEQ ID NO: 152
  Description of Artificial Sequence: Synthetic oligonucleotide

SEQ ID NO: 368 - protein, 16 aa, Artificial Sequence
  Description of Artificial Sequence: Synthetic peptide
ELPTQGTFSNVSTNVS

SEQ ID NO: 369 - DNA, 126 bp, Artificial Sequence; identical to SEQ ID NO: 154
  Description of Artificial Sequence: Synthetic polynucleotide

SEQ ID NO: 370 - protein, 42 aa, Artificial Sequence; identical to SEQ ID NO: 155
  Description of Artificial Sequence: Synthetic polypeptide

SEQ ID NO: 371 - DNA, 111 bp, Artificial Sequence; identical to SEQ ID NO: 156
  Description of Artificial Sequence: Synthetic polynucleotide

SEQ ID NO: 372 - protein, 37 aa, Artificial Sequence; identical to SEQ ID NO: 157
  Description of Artificial Sequence: Synthetic polypeptide

SEQ ID NO: 373 - DNA, 6 bp, Artificial Sequence
  Description of Artificial Sequence: Synthetic oligonucleotide
ctcgag

SEQ ID NO: 374 - protein, 2 aa, Artificial Sequence
  Description of Artificial Sequence: Synthetic peptide
LE

SEQ ID NO: 375 - DNA, 516 bp, Artificial Sequence; identical to SEQ ID NO: 239
  Description of Artificial Sequence: Synthetic polynucleotide

SEQ ID NO: 376 - protein, 172 aa, Artificial Sequence; identical to SEQ ID NO: 240
  Description of Artificial Sequence: Synthetic polypeptide

SEQ ID NO: 377 - DNA, 186 bp, Artificial Sequence; identical to SEQ ID NO: 241
  Description of Artificial Sequence: Synthetic polynucleotide

SEQ ID NO: 378 - protein, 62 aa, Artificial Sequence; identical to SEQ ID NO: 216
  Description of Artificial Sequence: Synthetic polypeptide

SEQ ID NO: 379 - DNA, 15 bp, Artificial Sequence
  Description of Artificial Sequence: Synthetic oligonucleotide
gcggccgcagtcgag

SEQ ID NO: 380 - protein, 5 aa, Artificial Sequence
  Description of Artificial Sequence: Synthetic peptide
AAAVE

SEQ ID NO: 381 - DNA, 336 bp, Artificial Sequence; identical to SEQ ID NO: 160
  Description of Artificial Sequence: Synthetic polynucleotide

SEQ ID NO: 382 - protein, 112 aa, Artificial Sequence; identical to SEQ ID NO: 161
  Description of Artificial Sequence: Synthetic polypeptide

SEQ ID NO: 383 - protein, 282 aa, Artificial Sequence; identical to SEQ ID NO: 22
  Description of Artificial Sequence: Synthetic polypeptide

SEQ ID NO: 384 - DNA, 846 bp, Artificial Sequence; identical to SEQ ID NO: 23
  Description of Artificial Sequence: Synthetic polynucleotide

SEQ ID NO: 385 - protein, 282 aa, Artificial Sequence; identical to SEQ ID NO: 24
  Description of Artificial Sequence: Synthetic polypeptide

SEQ ID NO: 386 - DNA, 846 bp, Artificial Sequence; identical to SEQ ID NO: 25
  Description of Artificial Sequence: Synthetic polynucleotide

SEQ ID NO: 387 - protein, 282 aa, Artificial Sequence; identical to SEQ ID NO: 26
  Description of Artificial Sequence: Synthetic polypeptide

SEQ ID NO: 388 - DNA, 846 bp, Artificial Sequence; identical to SEQ ID NO: 27
  Description of Artificial Sequence: Synthetic polynucleotide

SEQ ID NO: 389 - protein, 282 aa, Artificial Sequence; identical to SEQ ID NO: 28
  Description of Artificial Sequence: Synthetic polypeptide

SEQ ID NO: 390 - DNA, 864 bp, Artificial Sequence; identical to SEQ ID NO: 39
  Description of Artificial Sequence: Synthetic polynucleotide

SEQ ID NO: 391 - protein, 288 aa, Artificial Sequence; identical to SEQ ID NO: 40
  Description of Artificial Sequence: Synthetic polypeptide

SEQ ID NO: 392 - DNA, 864 bp, Artificial Sequence; identical to SEQ ID NO: 86
  Description of Artificial Sequence: Synthetic polynucleotide

SEQ ID NO: 393 - DNA, 324 bp, Artificial Sequence
  Description of Artificial Sequence: Synthetic polynucleotide
atgggagtgcaggtggagactattagccccggagatggcagaacattccccaaaagaggacagacttgcgtcgtgcattatactggaatgctggaagacggcaagaaggtggacagcagccgggaccgaaacaagcccttcaagttcatgctggggaagcaggaagtgatccggggctgggaggaaggagtcgcacagatgtcagtgggacagagggccaaactgactattagcccagactacgcttatggagcaaccggccaccccgggatcattccccctcatgctacactggtcttcgatgtggagctgctgaagctggaa

SEQ ID NO: 394 - protein, 108 aa, Artificial Sequence
  Description of Artificial Sequence: Synthetic polypeptide
MGVQVETISPGDGRTFPKRGQTCVVHYTGMLEDGKKVDSSRDRNKPFKFMLGKQEVIRGWEEGVAQMSVGQRAKLTISPDYAYGATGHPGIIPPHATLVFDVELLKLE

SEQ ID NO: 395 - DNA, 18 bp, Artificial Sequence
  Description of Artificial Sequence: Synthetic oligonucleotide
agcggaggaggatccgga

SEQ ID NO: 396 - protein, 6 aa, Artificial Sequence
  Description of Artificial Sequence: Synthetic peptide
SGGGSG

SEQ ID NO: 397 - DNA, 864 bp, Artificial Sequence; identical to SEQ ID NO: 46
  Description of Artificial Sequence: Synthetic polynucleotide

SEQ ID NO: 398 - DNA, 6 bp, Artificial Sequence
  Description of Artificial Sequence: Synthetic oligonucleotide
ccgcgg

SEQ ID NO: 399 - protein, 2 aa, Artificial Sequence
  Description of Artificial Sequence: Synthetic peptide
PR

SEQ ID NO: 400 - DNA, 54 bp, Artificial Sequence; identical to SEQ ID NO: 138
  Description of Artificial Sequence: Synthetic oligonucleotide

SEQ ID NO: 401 - protein, 18 aa, Artificial Sequence
  Description of Artificial Sequence: Synthetic peptide
EGRGSLLTCGDVEENPGP

SEQ ID NO: 402 - DNA, 6 bp, Artificial Sequence
  Description of Artificial Sequence: Synthetic oligonucleotide
ccatgg

SEQ ID NO: 403 - protein, 2 aa, Artificial Sequence
  Description of Artificial Sequence: Synthetic peptide
PW

SEQ ID NO: 404 - DNA, 63 bp, Artificial Sequence; identical to SEQ ID NO: 142
  Description of Artificial Sequence: Synthetic oligonucleotide

SEQ ID NO: 405 - protein, 21 aa, Artificial Sequence
  Description of Artificial Sequence: Synthetic peptide
MEFGLSWLFLVAILKGVQCSR

SEQ ID NO: 406 - DNA, 321 bp, Artificial Sequence; identical to SEQ ID NO: 144
  Description of Artificial Sequence: Synthetic polynucleotide

SEQ ID NO: 407 - protein, 107 aa, Artificial Sequence; identical to SEQ ID NO: 145
  Description of Artificial Sequence: Synthetic polypeptide

SEQ ID NO: 408 - DNA, 24 bp, Artificial Sequence
  Description of Artificial Sequence: Synthetic oligonucleotide
ggcggaggaagcggaggtgggggc

SEQ ID NO: 409 - protein, 8 aa, Artificial Sequence
  Description of Artificial Sequence: Synthetic peptide
GGGSGGGG

SEQ ID NO: 410 - DNA, 360 bp, Artificial Sequence; identical to SEQ ID NO: 148
  Description of Artificial Sequence: Synthetic polynucleotide

SEQ ID NO: 411 - protein, 120 aa, Artificial Sequence; identical to SEQ ID NO: 149
  Description of Artificial Sequence: Synthetic polypeptide

SEQ ID NO: 412 - DNA, 6 bp, Artificial Sequence
  Description of Artificial Sequence: Synthetic oligonucleotide
ggatcc

SEQ ID NO: 413 - protein, 2 aa, Artificial Sequence
  Description of Artificial Sequence: Synthetic peptide
GS

SEQ ID NO: 414 - DNA, 48 bp, Artificial Sequence; identical to SEQ ID NO: 152
  Description of Artificial Sequence: Synthetic oligonucleotide

SEQ ID NO: 415 - protein, 16 aa, Artificial Sequence
  Description of Artificial Sequence: Synthetic peptide
ELPTQGTFSNVSTNVS

SEQ ID NO: 416 - DNA, 126 bp, Artificial Sequence; identical to SEQ ID NO: 154
  Description of Artificial Sequence: Synthetic polynucleotide

SEQ ID NO: 417 - protein, 42 aa, Artificial Sequence; identical to SEQ ID NO: 155
  Description of Artificial Sequence: Synthetic polypeptide

SEQ ID NO: 418 - DNA, 111 bp, Artificial Sequence; identical to SEQ ID NO: 156
  Description of Artificial Sequence: Synthetic polynucleotide

SEQ ID NO: 419 - protein, 37 aa, Artificial Sequence; identical to SEQ ID NO: 157
  Description of Artificial Sequence: Synthetic polypeptide

SEQ ID NO: 420 - DNA, 6 bp, Artificial Sequence
  Description of Artificial Sequence: Synthetic oligonucleotide
gtcgac

SEQ ID NO: 421 - protein, 2 aa, Artificial Sequence
  Description of Artificial Sequence: Synthetic peptide
VD

SEQ ID NO: 422 - DNA, 516 bp, Artificial Sequence; identical to SEQ ID NO: 239
  Description of Artificial Sequence: Synthetic polynucleotide

SEQ ID NO: 423 - protein, 172 aa, Artificial Sequence; identical to SEQ ID NO: 240
  Description of Artificial Sequence: Synthetic polypeptide

SEQ ID NO: 424 - DNA, 186 bp, Artificial Sequence; identical to SEQ ID NO: 241
  Description of Artificial Sequence: Synthetic polynucleotide

SEQ ID NO: 425 - protein, 62 aa, Artificial Sequence; identical to SEQ ID NO: 216
  Description of Artificial Sequence: Synthetic polypeptide

SEQ ID NO: 426 - DNA, 336 bp, Artificial Sequence
  Description of Artificial Sequence: Synthetic polynucleotide
agagtgaagttcagcaggagcgcagacgcccccgcgtaccagcagggccagaaccagctctataacgagctcaatctaggacgaagagaggagtacgatgttttggacaagagacgtggccgggaccctgagatggggggaaagccgagaaggaagaaccctcaggaaggcctgtacaatgaactgcagaaagataagatggcggaggcctacagtgagattgggatgaaaggcgagcgccggaggggcaaggggcacgatggcctttaccagggtctcagtacagccaccaaggacacctacgacgcccttcacatgcaagctcttccacctcgt

SEQ ID NO: 427 - protein, 112 aa, Artificial Sequence; identical to SEQ ID NO: 161
  Description of Artificial Sequence: Synthetic polypeptide

SEQ ID NO: 428 - DNA, 3 bp, Artificial Sequence
  Description of Artificial Sequence: Synthetic oligonucleotide
acg

SEQ ID NO: 429 - protein, 1 aa, Artificial Sequence
  Description of Artificial Sequence: Synthetic peptide
T

SEQ ID NO: 430 - DNA, 261 bp, Artificial Sequence
  Description of Artificial Sequence: Synthetic polynucleotide
tggcacgaaggcctggaagaggcctcaagactttactttggtgaacgcaacgttaaaggcatgttcgaggtgctggaacccttgcatgcaatgatggagcgaggtcctcagacactcaaagagacatcttttaaccaggcgtatggacgggacctcatggaggctcaggaatggtgccgcaagtacatgaaaagtgggaatgtgaaggatctgctgcaagcatgggatctgtattaccacgtgtttagacggatcagcaaa

SEQ ID NO: 431 - protein, 87 aa, Artificial Sequence
  Description of Artificial Sequence: Synthetic polypeptide
WHEGLEEASRLYFGERNVKGMFEVLEPLHAMMERGPQTLKETSFNQAYGRDLMEAQEWCRKYMKSGNVKDLLQAWDLYYHVFRRISK

SEQ ID NO: 432 - DNA, 6 bp, Artificial Sequence
  Description of Artificial Sequence: Synthetic oligonucleotide
cgtacg

SEQ ID NO: 433 - protein, 2 aa, Artificial Sequence
  Description of Artificial Sequence: Synthetic peptide
RT

SEQ ID NO: 434 - DNA, 264 bp, Artificial Sequence
  Description of Artificial Sequence: Synthetic polynucleotide
tggcatgaagggttggaagaagcttcaaggctgtacttcggagagaggaacgtgaagggcatgtttgaggttcttgaacctctgcacgccatgatggaacggggaccgcagacactgaaagaaacctcttttaatcaggcctacggcagagacctgatggaggcccaagaatggtgtagaaagtatatgaaatccggtaacgtgaaagacctgctccaggcctgggacctttattaccatgtgttcaggcggatcagtaagtaa

SEQ ID NO: 435 - protein, 87 aa, Artificial Sequence; identical to SEQ ID NO: 431
  Description of Artificial Sequence: Synthetic polypeptide

SEQ ID NO: 436 - DNA, 324 bp, Artificial Sequence; identical to SEQ ID NO: 393
  Description of Artificial Sequence: Synthetic polynucleotide

SEQ ID NO: 437 - protein, 108 aa, Artificial Sequence; identical to SEQ ID NO: 394
  Description of Artificial Sequence: Synthetic polypeptide

SEQ ID NO: 438 - DNA, 18 bp, Artificial Sequence
  Description of Artificial Sequence: Synthetic oligonucleotide
agcggaggaggatccgga

SEQ ID NO: 439 - protein, 6 aa, Artificial Sequence
  Description of Artificial Sequence: Synthetic peptide
SGGGSG

SEQ ID NO: 440 - DNA, 864 bp, Artificial Sequence; identical to SEQ ID NO: 46
  Description of Artificial Sequence: Synthetic polynucleotide

SEQ ID NO: 441 - protein, 288 aa, Artificial Sequence; identical to SEQ ID NO: 45
  Description of Artificial Sequence: Synthetic polypeptide

SEQ ID NO: 442 - DNA, 6 bp, Artificial Sequence
  Description of Artificial Sequence: Synthetic oligonucleotide
ccgcgg

SEQ ID NO: 443 - protein, 2 aa, Artificial Sequence
  Description of Artificial Sequence: Synthetic peptide
PR

SEQ ID NO: 444 - DNA, 54 bp, Artificial Sequence; identical to SEQ ID NO: 313
  Description of Artificial Sequence: Synthetic oligonucleotide

SEQ ID NO: 445 - protein, 18 aa, Artificial Sequence
  Description of Artificial Sequence: Synthetic peptide
EGRGSLLTCGDVEENPGP

SEQ ID NO: 446 - DNA, 12 bp, Artificial Sequence
  Description of Artificial Sequence: Synthetic oligonucleotide
gcatgcgccacc

SEQ ID NO: 447 - protein, 4 aa, Artificial Sequence
  Description of Artificial Sequence: Synthetic peptide
ACAT

SEQ ID NO: 448 - DNA, 63 bp, Artificial Sequence
  Description of Artificial Sequence: Synthetic oligonucleotide
atggagtttgggttgtcatggttgtttctcgtcgctattctcaaaggtgtacaatgctcccgc

SEQ ID NO: 449 - protein, 21 aa, Artificial Sequence
  Description of Artificial Sequence: Synthetic peptide
MEFGLSWLFLVAILKGVQCSR

SEQ ID NO: 450 - DNA, 357 bp, Artificial Sequence; identical to SEQ ID NO: 168
  Description of Artificial Sequence: Synthetic polynucleotide

SEQ ID NO: 451 - protein, 119 aa, Artificial Sequence; identical to SEQ ID NO: 169
  Description of Artificial Sequence: Synthetic polypeptide

SEQ ID NO: 452 - DNA, 45 bp, Artificial Sequence
  Description of Artificial Sequence: Synthetic oligonucleotide
ggcggtggaggctccggtggaggcggctctggaggaggaggttca

SEQ ID NO: 453 - protein, 15 aa, Artificial Sequence
  Description of Artificial Sequence: Synthetic peptide
GGGGSGGGGSGGGGS

SEQ ID NO: 454 - DNA, 327 bp, Artificial Sequence; identical to SEQ ID NO: 164
  Description of Artificial Sequence: Synthetic polynucleotide

SEQ ID NO: 455 - protein, 109 aa, Artificial Sequence; identical to SEQ ID NO: 165
  Description of Artificial Sequence: Synthetic polypeptide

SEQ ID NO: 456 - DNA, 6 bp, Artificial Sequence
  Description of Artificial Sequence: Synthetic oligonucleotide
atgcat

SEQ ID NO: 457 - protein, 2 aa, Artificial Sequence
  Description of Artificial Sequence: Synthetic peptide
MH

SEQ ID NO: 458 - DNA, 48 bp, Artificial Sequence; identical to SEQ ID NO: 152
  Description of Artificial Sequence: Synthetic oligonucleotide

SEQ ID NO: 459 - protein, 16 aa, Artificial Sequence
  Description of Artificial Sequence: Synthetic peptide
ELPTQGTFSNVSTNVS

SEQ ID NO: 460 - DNA, 126 bp, Artificial Sequence; identical to SEQ ID NO: 154
  Description of Artificial Sequence: Synthetic polynucleotide

SEQ ID NO: 461 - protein, 42 aa, Artificial Sequence; identical to SEQ ID NO: 155
  Description of Artificial Sequence: Synthetic polypeptide

SEQ ID NO: 462 - DNA, 111 bp, Artificial Sequence; identical to SEQ ID NO: 156
  Description of Artificial Sequence: Synthetic polynucleotide

SEQ ID NO: 463 - protein, 37 aa, Artificial Sequence; identical to SEQ ID NO: 157
  Description of Artificial Sequence: Synthetic polypeptide

SEQ ID NO: 464 - DNA, 6 bp, Artificial Sequence
  Description of Artificial Sequence: Synthetic oligonucleotide
gtcgac

SEQ ID NO: 465 - protein, 2 aa, Artificial Sequence
  Description of Artificial Sequence: Synthetic peptide
VD

SEQ ID NO: 466 - DNA, 516 bp, Artificial Sequence; identical to SEQ ID NO: 239
  Description of Artificial Sequence: Synthetic polynucleotide

SEQ ID NO: 467 - protein, 172 aa, Artificial Sequence; identical to SEQ ID NO: 240
  Description of Artificial Sequence: Synthetic polypeptide

SEQ ID NO: 468 - DNA, 186 bp, Artificial Sequence; identical to SEQ ID NO: 241
  Description of Artificial Sequence: Synthetic polynucleotide

SEQ ID NO: 469 - protein, 62 aa, Artificial Sequence; identical to SEQ ID NO: 216
  Description of Artificial Sequence: Synthetic polypeptide

SEQ ID NO: 470 - DNA, 336 bp, Artificial Sequence; identical to SEQ ID NO: 426
  Description of Artificial Sequence: Synthetic polynucleotide

SEQ ID NO: 471 - protein, 112 aa, Artificial Sequence; identical to SEQ ID NO: 161
  Description of Artificial Sequence: Synthetic polypeptide

SEQ ID NO: 472 - DNA, 3 bp, Artificial Sequence
  Description of Artificial Sequence: Synthetic oligonucleotide
acg

SEQ ID NO: 473 - protein, 1 aa, Artificial Sequence
  Description of Artificial Sequence: Synthetic peptide
T

SEQ ID NO: 474 - DNA, 261 bp, Artificial Sequence; identical to SEQ ID NO: 430
  Description of Artificial Sequence: Synthetic polynucleotide

SEQ ID NO: 475 - protein, 87 aa, Artificial Sequence; identical to SEQ ID NO: 431
  Description of Artificial Sequence: Synthetic polypeptide

SEQ ID NO: 476 - DNA, 6 bp, Artificial Sequence
  Description of Artificial Sequence: Synthetic oligonucleotide
cgtacg

SEQ ID NO: 477 - protein, 2 aa, Artificial Sequence
  Description of Artificial Sequence: Synthetic peptide
RT

SEQ ID NO: 478 - DNA, 264 bp, Artificial Sequence; identical to SEQ ID NO: 434
  Description of Artificial Sequence: Synthetic polynucleotide

SEQ ID NO: 479 - protein, 87 aa, Artificial Sequence; identical to SEQ ID NO: 431
  Description of Artificial Sequence: Synthetic polypeptide

SEQ ID NO: 480 - DNA, 6 bp, Artificial Sequence
  Description of Artificial Sequence: Synthetic oligonucleotide
gccacc

SEQ ID NO: 481 - DNA, 324 bp, Artificial Sequence; identical to SEQ ID NO: 393
  Description of Artificial Sequence: Synthetic polynucleotide

SEQ ID NO: 482 - protein, 108 aa, Artificial Sequence; identical to SEQ ID NO: 394
  Description of Artificial Sequence: Synthetic polypeptide

SEQ ID NO: 483 - DNA, 18 bp, Artificial Sequence
  Description of Artificial Sequence: Synthetic oligonucleotide
agcggaggaggatccgga

SEQ ID NO: 484 - protein, 6 aa, Artificial Sequence
  Description of Artificial Sequence: Synthetic peptide
SGGGSG

SEQ ID NO: 485 - DNA, 864 bp, Artificial Sequence; identical to SEQ ID NO: 46
  Description of Artificial Sequence: Synthetic polynucleotide

SEQ ID NO: 486 - protein, 288 aa, Artificial Sequence; identical to SEQ ID NO: 45
  Description of Artificial Sequence: Synthetic polypeptide

SEQ ID NO: 487 - DNA, 6 bp, Artificial Sequence
  Description of Artificial Sequence: Synthetic oligonucleotide
ccgcgg

SEQ ID NO: 488 - protein, 2 aa, Artificial Sequence
  Description of Artificial Sequence: Synthetic peptide
PR

SEQ ID NO: 489 - DNA, 54 bp, Artificial Sequence; identical to SEQ ID NO: 313
  Description of Artificial Sequence: Synthetic oligonucleotide

SEQ ID NO: 490 - protein, 18 aa, Artificial Sequence
  Description of Artificial Sequence: Synthetic peptide
EGRGSLLTCGDVEENPGP

SEQ ID NO: 491 - DNA, 12 bp, Artificial Sequence
  Description of Artificial Sequence: Synthetic oligonucleotide
gcatgcgccacc

SEQ ID NO: 492 - protein, 4 aa, Artificial Sequence
  Description of Artificial Sequence: Synthetic peptide
ACAT

SEQ ID NO: 493 - DNA, 63 bp, Artificial Sequence; identical to SEQ ID NO: 448
  Description of Artificial Sequence: Synthetic oligonucleotide

SEQ ID NO: 494 - protein, 21 aa, Artificial Sequence
  Description of Artificial Sequence: Synthetic peptide
MEFGLSWLFLVAILKGVQCSR

SEQ ID NO: 495 - DNA, 357 bp, Artificial Sequence; identical to SEQ ID NO: 168
  Description of Artificial Sequence: Synthetic polynucleotide

SEQ ID NO: 496 - protein, 119 aa, Artificial Sequence; identical to SEQ ID NO: 169
  Description of Artificial Sequence: Synthetic polypeptide

SEQ ID NO: 497 - DNA, 45 bp, Artificial Sequence; identical to SEQ ID NO: 452
  Description of Artificial Sequence: Synthetic oligonucleotide

SEQ ID NO: 498 - protein, 15 aa, Artificial Sequence
  Description of Artificial Sequence: Synthetic peptide
GGGGSGGGGSGGGGS

SEQ ID NO: 499 - DNA, 327 bp, Artificial Sequence; identical to SEQ ID NO: 164
  Description of Artificial Sequence: Synthetic polynucleotide

SEQ ID NO: 500 - protein, 109 aa, Artificial Sequence; identical to SEQ ID NO: 165
  Description of Artificial Sequence: Synthetic polypeptide

SEQ ID NO: 501 - DNA, 6 bp, Artificial Sequence
  Description of Artificial Sequence: Synthetic oligonucleotide
atgcat

SEQ ID NO: 502 - protein, 2 aa, Artificial Sequence
  Description of Artificial Sequence: Synthetic peptide
MH

SEQ ID NO: 503 - DNA, 48 bp, Artificial Sequence; identical to SEQ ID NO: 152
  Description of Artificial Sequence: Synthetic oligonucleotide

SEQ ID NO: 504 - protein, 16 aa, Artificial Sequence
  Description of Artificial Sequence: Synthetic peptide
ELPTQGTFSNVSTNVS

SEQ ID NO: 505 - DNA, 126 bp, Artificial Sequence; identical to SEQ ID NO: 154
  Description of Artificial Sequence: Synthetic polynucleotide

SEQ ID NO: 506 - protein, 42 aa, Artificial Sequence; identical to SEQ ID NO: 155
  Description of Artificial Sequence: Synthetic polypeptide

SEQ ID NO: 507 - DNA, 111 bp, Artificial Sequence; identical to SEQ ID NO: 156
  Description of Artificial Sequence: Synthetic polynucleotide

SEQ ID NO: 508 - protein, 37 aa, Artificial Sequence; identical to SEQ ID NO: 157
  Description of Artificial Sequence: Synthetic polypeptide

SEQ ID NO: 509 - DNA, 6 bp, Artificial Sequence
  Description of Artificial Sequence: Synthetic oligonucleotide
gtcgac

SEQ ID NO: 510 - protein, 2 aa, Artificial Sequence
  Description of Artificial Sequence: Synthetic peptide
VD

SEQ ID NO: 511 - DNA, 516 bp, Artificial Sequence; identical to SEQ ID NO: 239
  Description of Artificial Sequence: Synthetic polynucleotide

SEQ ID NO: 512 - protein, 172 aa, Artificial Sequence; identical to SEQ ID NO: 240
  Description of Artificial Sequence: Synthetic polypeptide

SEQ ID NO: 513 - DNA, 186 bp, Artificial Sequence; identical to SEQ ID NO: 241
  Description of Artificial Sequence: Synthetic polynucleotide

SEQ ID NO: 514 - protein, 62 aa, Artificial Sequence; identical to SEQ ID NO: 216
  Description of Artificial Sequence: Synthetic polypeptide

SEQ ID NO: 515 - DNA, 339 bp, Artificial Sequence
  Description of Artificial Sequence: Synthetic polynucleotide
agagtgaagttcagcaggagcgcagacgcccccgcgtaccagcagggccagaaccagctctataacgagctcaatctaggacgaagagaggagtacgatgttttggacaagagacgtggccgggaccctgagatggggggaaagccgagaaggaagaaccctcaggaaggcctgtacaatgaactgcagaaagataagatggcggaggcctacagtgagattgggatgaaaggcgagcgccggaggggcaaggggcacgatggcctttaccagggtctcagtacagccaccaaggacacctacgacgcccttcacatgcaagctcttccacctcgttga

SEQ ID NO: 516 - protein, 112 aa, Artificial Sequence; identical to SEQ ID NO: 161
  Description of Artificial Sequence: Synthetic polypeptide

SEQ ID NO: 517 - DNA, 9 bp, Artificial Sequence
  Description of Artificial Sequence: Synthetic oligonucleotide
atgctcgag

SEQ ID NO: 518 - protein, 3 aa, Artificial Sequence
  Description of Artificial Sequence: Synthetic peptide
MLE

SEQ ID NO: 519 - DNA, 320 bp, Artificial Sequence
  Description of Artificial Sequence: Synthetic polynucleotide
ggagtgcaggtggagactatctccccaggagacgggcgcaccttccccaagcgcggccagacctgcgtggtgcactacaccgggatgcttgaagatggaaagaaagttgattcctcccgggacagaaacaagccctttaagtttatgctaggcaagcaggaggtgatccgaggctgggaagaaggggttgcccagatgagtgtgggtcagagagccaaactgactatatctccagattatgcctatggtgccactgggcacccaggcatcatcccaccacatgccactctcgtcttcgatgtggagcttctaaaactgga

SEQ ID NO: 520 - protein, 106 aa, Artificial Sequence
  Description of Artificial Sequence: Synthetic polypeptide
GVQVETISPGDGRTFPKRGQTCVVHYTGMLEDGKKVDSSRDRNKPFKFMLGKQEVIRGWEEGVAQMSVGQRAKLTISPDYAYGATGHPGIIPPHATLVFDVELLKL

SEQ ID NO: 521 - DNA, 19 bp, Artificial Sequence
  Description of Artificial Sequence: Synthetic oligonucleotide
atctggcggtggatccgga

SEQ ID NO: 522 - protein, 6 aa, Artificial Sequence
  Description of Artificial Sequence: Synthetic peptide
SGGGSG

SEQ ID NO: 523 - DNA, 921 bp, Artificial Sequence
  Description of Artificial Sequence: Synthetic polynucleotide
gtcgacggatttggtgatgtcggtgctcttgagagtttgaggggaaatgcagatttggcttacatcctgagcatggagccctgtggccactgcctcattatcaacaatgtgaacttctgccgtgagtccgggctccgcacccgcactggctccaacatcgactgtgagaagttgcggcgtcgcttctcctcgctgcatttcatggtggaggtgaagggcgacctgactgccaagaaaatggtgctggctttgctggagctggcgcggcaggaccacggtgctctggactgctgcgtggtggtcattctctctcacggctgtcaggccagccacctgcagttcccaggggctgtctacggcacagatggatgccctgtgtcggtcgagaagattgtgaacatcttcaatgggaccagctgccccagcctgggagggaagcccaagctctttttcatccaggcctgtggtggggagcagaaagaccatgggtttgaggtggcctccacttcccctgaagacgagtcccctggcagtaaccccgagccagatgccaccccgttccaggaaggtttgaggaccttcgaccagctggacgccatatctagtttgcccacacccagtgacatctttgtgtcctactctactttcccaggttttgtttcctggagggaccccaagagtggctcctggtacgttgagaccctggacgacatctttgagcagtgggctcactctgaagacctgcagtccctcctgcttagggtcgctaatgctgtttcggtgaaagggatttataaacagatgcctggttgctttaatttcctccggaaaaaacttttctttaaaacatcagctagcagagccgagggcaggggaagtcttctaacatgcggggacgtggaggaaaatcccgggccctga

SEQ ID NO: 524 - protein, 284 aa, Artificial Sequence
  Description of Artificial Sequence: Synthetic polypeptide
VDGFGDVGALESLRGNADLAYILSMEPCGHCLIINNVNFCRESGLRTRTGSNIDCEKLRRRFSSLHFMVEVKGDLTAKKMVLALLELARQDHGALDCCVVVILSHGCQASHLQFPGAVYGTDGCPVSVEKIVNIFNGTSCPSLGGKPKLFFIQACGGEQKDHGFEVASTSPEDESPGSNPEPDATPFQEGLRTFDQLDAISSLPTPSDIFVSYSTFPGFVSWRDPKSGSWYVETLDDIFEQWAHSEDLQSLLLRVANAVSVKGIYKQMPGCFNFLRKKLFFKTS

SEQ ID NO: 525 - DNA, 12 bp, Artificial Sequence
  Description of Artificial Sequence: Synthetic oligonucleotide
gctagcagagcc

SEQ ID NO: 526 - protein, 4 aa, Artificial Sequence
  Description of Artificial Sequence: Synthetic peptide
ASRA

SEQ ID NO: 527 - DNA, 57 bp, Artificial Sequence
  Description of Artificial Sequence: Synthetic oligonucleotide
gagggcaggggaagtcttctaacatgcggggacgtggaggaaaatcccgggccctga

SEQ ID NO: 528 - protein, 18 aa, Artificial Sequence
  Description of Artificial Sequence: Synthetic peptide
EGRGSLLTCGDVEENPGP

SEQ ID NO: 529 - DNA, 9 bp, Artificial Sequence
  Description of Artificial Sequence: Synthetic oligonucleotide
atgctcgag

SEQ ID NO: 530 - protein, 3 aa, Artificial Sequence
  Description of Artificial Sequence: Synthetic peptide
MLE

SEQ ID NO: 531 - DNA, 261 bp, Artificial Sequence
  Description of Artificial Sequence: Synthetic polynucleotide
tggcatgaagggttggaagaagcttcaaggctgtacttcggagagaggaacgtgaagggcatgtttgaggttcttgaacctctgcacgccatgatggaacggggaccgcagacactgaaagaaacctcttttaatcaggcctacggcagagacctgatggaggcccaagaatggtgtagaaagtatatgaaatccggtaacgtgaaagacctgctccaggcctgggacctttattaccatgtgttcaggcggatcagtaag

SEQ ID NO: 532 - protein, 107 aa, Artificial Sequence
  Description of Artificial Sequence: Synthetic polypeptide
GVQVETISPGDGRTFPKRGQTCVVHYTGMLEDGKKFDSSRDRNKPFKFMLGKQEVIRGWEEGVAQMSVGQRAKLTISPDYAYGATGHPPKIPPHATLVFDVELLKLE

SEQ ID NO: 533 - DNA, 24 bp, Artificial Sequence
  Description of Artificial Sequence: Synthetic oligonucleotide
tcaggcggtggctcaggtgtcgag

SEQ ID NO: 534 - protein, 8 aa, Artificial Sequence
  Description of Artificial Sequence: Synthetic peptide
SGGGSGVD

SEQ ID NO: 535 - DNA, 864 bp, Artificial Sequence; identical to SEQ ID NO: 44
  Description of Artificial Sequence: Synthetic polynucleotide

SEQ ID NO: 536 - protein, 287 aa, Artificial Sequence
  Description of Artificial Sequence: Synthetic polypeptide
DGFGDVGALESLRGNADLAYILSMEPCGHCLIINNVNFCRESGLRTRTGSNIDCEKLRRRFSSLHFMVEVKGDLTAKKMVLALLELARQDHGALDCCVVVILSHGCQASHLQFPGAVYGTDGCPVSVEKIVNIFNGTSCPSLGGKPKLFFIQACGGEQKDHGFEVASTSPEDESPGSNPEPDATPFQEGLRTFDQLDAISSLPTPSDIFVSYSTFPGFVSWRDPKSGSWYVETLDDIFEQWAHSEDLQSLLLRVANAVSVKGIYKQMPGCFNFLRKKLFFKTSASRA

SEQ ID NO: 537 - DNA, 57 bp, Artificial Sequence; identical to SEQ ID NO: 527
  Description of Artificial Sequence: Synthetic oligonucleotide

SEQ ID NO: 538 - protein, 18 aa, Artificial Sequence
  Description of Artificial Sequence: Synthetic peptide
EGRGSLLTCGDVEENPGP

SEQ ID NO: 539 - DNA, 270 bp, Artificial Sequence
  Description of Artificial Sequence: Synthetic polynucleotide
atgctcgagtggcatgaaggcctggaagaggcatctcgtttgtactttggggaaaggaacgtgaaaggcatgtttgaggtgctggagcccttgcacgctatgatggaacggggcccccagactctgaaggaaacatcctttaatcaggcctatggtcgagatttaatggaggcccaagagtggtgcaggaagtacatgaaatcagggaatgtcaaggacctcctccaagcctgggacctctattatcatgtgttccgacgaatctcaaag

SEQ ID NO: 540 - protein, 90 aa, Artificial Sequence
  Description of Artificial Sequence: Synthetic polypeptide
MLEWHEGLEEASRLYFGERNVKGMFEVLEPLHAMMERGPQTLKETSFNQAYGRDLMEAQEWCRKYMKSGNVKDLLQAWDLYYHVFRRISK

SEQ ID NO: 541 - DNA, 6 bp, Artificial Sequence
  Description of Artificial Sequence: Synthetic oligonucleotide
gtcgag

SEQ ID NO: 542 - protein, 2 aa, Artificial Sequence
  Description of Artificial Sequence: Synthetic peptide
VD

SEQ ID NO: 543 - DNA, 261 bp, Artificial Sequence; identical to SEQ ID NO: 531
  Description of Artificial Sequence: Synthetic polynucleotide

SEQ ID NO: 544 - protein, 87 aa, Artificial Sequence; identical to SEQ ID NO: 431
  Description of Artificial Sequence: Synthetic polypeptide

SEQ ID NO: 545 - DNA, 24 bp, Artificial Sequence
  Description of Artificial Sequence: Synthetic oligonucleotide
tcaggcggtggctcaggtgtcgag

SEQ ID NO: 546 - protein, 8 aa, Artificial Sequence
  Description of Artificial Sequence: Synthetic peptide
SGGGSGVD

SEQ ID NO: 547 - DNA, 261 bp, Artificial Sequence
  Description of Artificial Sequence: Synthetic polynucleotide
tggcatgaaggcctggaagaggcatctcgtttgtactttggggaaaggaacgtgaaaggcatgtttgaggtgctggagcccttgcacgctatgatggaacggggcccccagactctgaaggaaacatcctttaatcaggcctatggtcgagatttaatggaggcccaagagtggtgcaggaagtacatgaaatcagggaatgtcaaggacctcctccaagcctgggacctctattatcatgtgttccgacgaatctcaaag

SEQ ID NO: 548 - protein, 87 aa, Artificial Sequence; identical to SEQ ID NO: 431
  Description of Artificial Sequence: Synthetic polypeptide

SEQ ID NO: 549 - DNA, 6 bp, Artificial Sequence
  Description of Artificial Sequence: Synthetic oligonucleotide
gtcgac

SEQ ID NO: 550 - protein, 2 aa, Artificial Sequence
  Description of Artificial Sequence: Synthetic peptide
VD

SEQ ID NO: 551 - DNA, 285 bp, Artificial Sequence
  Description of Artificial Sequence: Synthetic polynucleotide
tggcatgaagggttggaagaagcttcaaggctgtacttcggagagaggaacgtgaagggcatgtttgaggttcttgaacctctgcacgccatgatggaacggggaccgcagacactgaaagaaacctcttttaatcaggcctacggcagagacctgatggaggcccaagaatggtgtagaaagtatatgaaatccggtaacgtgaaagacctgctccaggcctgggacctttattaccatgtgttcaggcggatcagtaagtcaggcggtggctcaggtgtcgac

SEQ ID NO: 552 - protein, 87 aa, Artificial Sequence; identical to SEQ ID NO: 431
  Description of Artificial Sequence: Synthetic polypeptide

SEQ ID NO: 553 - DNA, 6 bp, Artificial Sequence
  Description of Artificial Sequence: Synthetic oligonucleotide
gtcgac

SEQ ID NO: 554 - protein, 2 aa, Artificial Sequence
  Description of Artificial Sequence: Synthetic peptide
VE

SEQ ID NO: 555 - DNA, 36 bp, Artificial Sequence
  Description of Artificial Sequence: Synthetic oligonucleotide
tatccgtacgacgtaccagactacgcactcgactaa

SEQ ID NO: 556 - protein, 11 aa, Artificial Sequence
  Description of Artificial Sequence: Synthetic peptide
YPYDVPDYALD

SEQ ID NO: 557 - DNA, 51 bp, Artificial Sequence
  Description of Artificial Sequence: Synthetic oligonucleotide
atgggctgtgtgcaatgtaaggataaagaagcaacaaaactgacggaggag

SEQ ID NO: 558 - protein, 17 aa, Artificial Sequence
  Description of Artificial Sequence: Synthetic peptide
MGCVQCKDKEATKLTEE

SEQ ID NO: 559 - DNA, 6 bp, Artificial Sequence
  Description of Artificial Sequence: Synthetic oligonucleotide
ctcgag

SEQ ID NO: 560 - protein, 2 aa, Artificial Sequence
  Description of Artificial Sequence: Synthetic peptide
LG

SEQ ID NO: 561 - DNA, 261 bp, Artificial Sequence; identical to SEQ ID NO: 547
  Description of Artificial Sequence: Synthetic polynucleotide

SEQ ID NO: 562 - protein, 90 aa, Artificial Sequence; identical to SEQ ID NO: 540
  Description of Artificial Sequence: Synthetic polypeptide

SEQ ID NO: 563 - DNA, 6 bp, Artificial Sequence
  Description of Artificial Sequence: Synthetic oligonucleotide
gtcgag

SEQ ID NO: 564 - protein, 2 aa, Artificial Sequence
  Description of Artificial Sequence: Synthetic peptide
VD

SEQ ID NO: 565 - DNA, 261 bp, Artificial Sequence; identical to SEQ ID NO: 531
  Description of Artificial Sequence: Synthetic polynucleotide

SEQ ID NO: 566 - protein, 87 aa, Artificial Sequence; identical to SEQ ID NO: 431
  Description of Artificial Sequence: Synthetic polypeptide

SEQ ID NO: 567 - DNA, 19 bp, Artificial Sequence
  Description of Artificial Sequence: Synthetic oligonucleotide
tcaggcggtggctcaggtg

SEQ ID NO: 568 - protein, 8 aa, Artificial Sequence
  Description of Artificial Sequence: Synthetic peptide
SGGGSGVD

SEQ ID NO: 569 - DNA, 36 bp, Artificial Sequence; identical to SEQ ID NO: 555
  Description of Artificial Sequence: Synthetic oligonucleotide

SEQ ID NO: 570 - protein, 11 aa, Artificial Sequence
  Description of Artificial Sequence: Synthetic peptide
YPYDVPDYALD

SEQ ID NO: 571 - DNA, 9 bp, Artificial Sequence
  Description of Artificial Sequence: Synthetic oligonucleotide
atgctcgag

SEQ ID NO: 572 - protein, 3 aa, Artificial Sequence
  Description of Artificial Sequence: Synthetic peptide
MLE

SEQ ID NO: 573 - DNA, 321 bp, Artificial Sequence
  Description of Artificial Sequence: Synthetic polynucleotide
ggcgtccaagtcgaaaccattagtcccggcgatggcagaacatttcctaaaaggggacaaacatgtgtcgtccattatacaggcatgttggaggacggcaaaaagttcgacagtagtagagatcgcaataaacctttcaaattcatgttgggaaaacaagaagtcattaggggatgggaggagggcgtggctcaaatgtccgtcggccaacgcgctaagctcaccatcagccccgactacgcatacggcgctaccggacatccccctaagattccccctcacgctaccttggtgtttgacgtcgaactgttgaagctcgaa

SEQ ID NO: 574 - protein, 107 aa, Artificial Sequence; identical to SEQ ID NO: 532
  Description of Artificial Sequence: Synthetic polypeptide

SEQ ID NO: 575 - DNA, 6 bp, Artificial Sequence
  Description of Artificial Sequence: Synthetic oligonucleotide
gtcgag

SEQ ID NO: 576 - protein, 2 aa, Artificial Sequence
  Description of Artificial Sequence: Synthetic peptide
VD

SEQ ID NO: 577 - DNA, 321 bp, Artificial Sequence
  Description of Artificial Sequence: Synthetic polynucleotide
ggagtgcaggtggagactatctccccaggagacgggcgcaccttccccaagcgcggccagacctgcgtggtgcactacaccgggatgcttgaagatggaaagaaattcgattcctctcgggacagaaacaagccctttaagtttatgctaggcaagcaggaggtgatccgaggctgggaagaaggggttgcccagatgagtgtgggtcagagagccaaactgactatatctccagattatgcctatggtgccactgggcacccacctaagatcccaccacatgccactctcgtcttcgatgtggagcttctaaaactggaa

SEQ ID NO: 578 - protein, 107 aa, Artificial Sequence; identical to SEQ ID NO: 532
  Description of Artificial Sequence: Synthetic polypeptide

SEQ ID NO: 579 - DNA, 24 bp, Artificial Sequence
  Description of Artificial Sequence: Synthetic oligonucleotide
tcaggcggtggctcaggtgtcgag

SEQ ID NO: 580 - protein, 8 aa, Artificial Sequence
  Description of Artificial Sequence: Synthetic peptide
SGGGSGVD

SEQ ID NO: 581 - DNA, 321 bp, Artificial Sequence; identical to SEQ ID NO: 573
  Description of Artificial Sequence: Synthetic polynucleotide

SEQ ID NO: 582 - protein, 107 aa, Artificial Sequence; identical to SEQ ID NO: 532
  Description of Artificial Sequence: Synthetic polypeptide

SEQ ID NO: 583 - DNA, 6 bp, Artificial Sequence
  Description of Artificial Sequence: Synthetic oligonucleotide
gtcgac

SEQ ID NO: 584 - protein, 2 aa, Artificial Sequence
  Description of Artificial Sequence: Synthetic peptide
VD

SEQ ID NO: 585 - DNA, 321 bp, Artificial Sequence; identical to SEQ ID NO: 577
  Description of Artificial Sequence: Synthetic polynucleotide

SEQ ID NO: 586 - protein, 107 aa, Artificial Sequence; identical to SEQ ID NO: 532
  Description of Artificial Sequence: Synthetic polypeptide

SEQ ID NO: 587 - DNA, 24 bp, Artificial Sequence
  Description of Artificial Sequence: Synthetic oligonucleotide
tcaggcggtggctcaggtgtcgag

SEQ ID NO: 588 - protein, 8 aa, Artificial Sequence
  Description of Artificial Sequence: Synthetic peptide
SGGGSGVD

SEQ ID NO: 589 - DNA, 36 bp, Artificial Sequence; identical to SEQ ID NO: 555
  Description of Artificial Sequence: Synthetic oligonucleotide

SEQ ID NO: 590 - protein, 11 aa, Artificial Sequence
  Description of Artificial Sequence: Synthetic peptide
YPYDVPDYALD

SEQ ID NO: 591 - DNA, 330 bp, Artificial Sequence
  Description of Artificial Sequence: Synthetic polynucleotide
atgctcgagggagtgcaggtggagactatctccccaggagacgggcgcaccttccccaagcgcggccagacctgcgtggtgcactacaccgggatgcttgaagatggaaagaaagttgattcctcccgggacagaaacaagccctttaagtttatgctaggcaagcaggaggtgatccgaggctgggaagaaggggttgcccagatgagtgtgggtcagagagccaaactgactatatctccagattatgcctatggtgccactgggcacccaggcatcatcccaccacatgccactctcgtcttcgatgtggagcttctaaaactggaa

SEQ ID NO: 592 - protein, 110 aa, Artificial Sequence; identical to SEQ ID NO: 36
  Description of Artificial Sequence: Synthetic polypeptide

SEQ ID NO: 593 - DNA, 18 bp, Artificial Sequence
  Description of Artificial Sequence: Synthetic oligonucleotide
tctggcggtggatccgga

SEQ ID NO: 594 - protein, 6 aa, Artificial Sequence
  Description of Artificial Sequence: Synthetic peptide
SGGGSG

SEQ ID NO: 595 - DNA, 864 bp, Artificial Sequence; identical to SEQ ID NO: 44
  Description of Artificial Sequence: Synthetic polynucleotide

SEQ ID NO: 596 - protein, 288 aa, Artificial Sequence; identical to SEQ ID NO: 45
  Description of Artificial Sequence: Synthetic polypeptide

SEQ ID NO: 597 - DNA, 54 bp, Artificial Sequence; identical to SEQ ID NO: 313
  Description of Artificial Sequence: Synthetic oligonucleotide

SEQ ID NO: 598 - protein, 18 aa, Artificial Sequence
  Description of Artificial Sequence: Synthetic peptide
EGRGSLLTCGDVEENPGP

SEQ ID NO: 599 - DNA, 1002 bp, Artificial Sequence
  Description of Artificial Sequence: Synthetic polynucleotide
atgccacctcctcgcctcctcttcttcctcctcttcctcacccccatggaagtcaggcccgaggaacctctagtggtgaaggtggaagagggagataacgctgtgctgcagtgcctcaaggggacctcagatggccccactcagcagctgacctggtctcgggagtccccgcttaaacccttcttaaaactcagcctggggctgccaggcctgggaatccacatgaggcccctggccatctggcttttcatcttcaacgtctctcaacagatggggggcttctacctgtgccagccggggcccccctctgagaaggcctggcagcctggctggacagtcaatgtggagggcagcggggagctgttccggtggaatgtttcggacctaggtggcctgggctgtggcctgaagaacaggtcctcagagggccccagctccccttccgggaagctcatgagccccaagctgtatgtgtgggccaaagaccgccctgagatctgggagggagagcctccgtgtctcccaccgagggacagcctgaaccagagcctcagccaggacctcaccatggcccctggctccacactctggctgtcctgtggggtaccccctgactctgtgtccaggggccccctctcctggacccatgtgcaccccaaggggcctaagtcattgctgagcctagagctgaaggacgatcgcccggccagagatatgtgggtaatggagacgggtctgttgttgccccgggccacagctcaagacgctggaaagtattattgtcaccgtggcaacctgaccatgtcattccacctggagatcactgctcggccagtactatggcactggctgctgaggactggtggctggaaggtctcagctgtgactttggcttatctgatcttctgcctgtgttcccttgtgggcattcttcatcttcaaagagccctggtcctgaggaggaaaagaaagcgaatgactgaccccaccaggagattctaa

SEQ ID NO: 600 - protein, 333 aa, Artificial Sequence; identical to SEQ ID NO: 15
  Description of Artificial Sequence: Synthetic polypeptide

SEQ ID NO: 601 - DNA, 330 bp, Artificial Sequence; identical to SEQ ID NO: 591
  Description of Artificial Sequence: Synthetic polynucleotide

SEQ ID NO: 602 - protein, 110 aa, Artificial Sequence; identical to SEQ ID NO: 36
  Description of Artificial Sequence: Synthetic polypeptide

SEQ ID NO: 603 - DNA, 18 bp, Artificial Sequence
  Description of Artificial Sequence: Synthetic oligonucleotide
tctggcggtggatccgga

SEQ ID NO: 604 - protein, 6 aa, Artificial Sequence
  Description of Artificial Sequence: Synthetic peptide
SGGGSG

SEQ ID NO: 605 - DNA, 864 bp, Artificial Sequence; identical to SEQ ID NO: 44
  Description of Artificial Sequence: Synthetic polynucleotide

SEQ ID NO: 606 - protein, 288 aa, Artificial Sequence; identical to SEQ ID NO: 45
  Description of Artificial Sequence: Synthetic polypeptide

SEQ ID NO: 607 - DNA, 54 bp, Artificial Sequence; identical to SEQ ID NO: 313
  Description of Artificial Sequence: Synthetic oligonucleotide

SEQ ID NO: 608 - protein, 18 aa, Artificial Sequence
  Description of Artificial Sequence: Synthetic peptide
EGRGSLLTCGDVEENPGP

SEQ ID NO: 609 - DNA, 999 bp, Artificial Sequence; identical to SEQ ID NO: 14
  Description of Artificial Sequence: Synthetic polynucleotide

SEQ ID NO: 610 - protein, 333 aa, Artificial Sequence; identical to SEQ ID NO: 15
  Description of Artificial Sequence: Synthetic polypeptide

SEQ ID NO: 611 - DNA, 9 bp, Artificial Sequence
  Description of Artificial Sequence: Synthetic oligonucleotide
gggagtggg

SEQ ID NO: 612 - protein, 3 aa, Artificial Sequence
  Description of Artificial Sequence: Synthetic peptide
GSG

SEQ ID NO: 613 - DNA, 57 bp, Artificial Sequence
  Description of Artificial Sequence: Synthetic oligonucleotide
gctacgaattttagcttgctgaagcaggccggtgatgtggaagagaaccccgggcct

SEQ ID NO: 614 - protein, 19 aa, Artificial Sequence
  Description of Artificial Sequence: Synthetic peptide
ATNFSLLKQAGDVEENPGP

SEQ ID NO: 615 - DNA, 264 bp, Artificial Sequence
  Description of Artificial Sequence: Synthetic polynucleotide
tggcacgaaggtttggaagaggcctcccgcctgtatttcggtgagagaaatgtcaaaggtatgtttgaagtgcttgagcccctgcacgccatgatggaacgggggccgcagactctgaaagaaacctcattcaaccaggcatacgggcgagacctgatggaagcgcaggaatggtgtaggaagtacatgaagtccggaaatgtgaaggacttgctccaggcttgggacctgtactatcacgtatttcggagaataagcaagtaa

SEQ ID NO: 616 - protein, 87 aa, Artificial Sequence; identical to SEQ ID NO: 431
  Description of Artificial Sequence: Synthetic polypeptide

SEQ ID NO: 617 - DNA, 330 bp, Artificial Sequence; identical to SEQ ID NO: 591
  Description of Artificial Sequence: Synthetic polynucleotide

SEQ ID NO: 618 - protein, 110 aa, Artificial Sequence; identical to SEQ ID NO: 36
  Description of Artificial Sequence: Synthetic polypeptide

SEQ ID NO: 619 - DNA, 18 bp, Artificial Sequence
  Description of Artificial Sequence: Synthetic oligonucleotide
tctggcggtggatccgga

SEQ ID NO: 620 - protein, 6 aa, Artificial Sequence
  Description of Artificial Sequence: Synthetic peptide
SGGGSG

SEQ ID NO: 621 - DNA, 864 bp, Artificial Sequence; identical to SEQ ID NO: 44
  Description of Artificial Sequence: Synthetic polynucleotide

SEQ ID NO: 622 - protein, 288 aa, Artificial Sequence; identical to SEQ ID NO: 45
  Description of Artificial Sequence: Synthetic polypeptide

SEQ ID NO: 623 - DNA, 54 bp, Artificial Sequence; identical to SEQ ID NO: 313
  Description of Artificial Sequence: Synthetic oligonucleotide

SEQ ID NO: 624 - protein, 18 aa, Artificial Sequence
  Description of Artificial Sequence: Synthetic peptide
EGRGSLLTCGDVEENPGP

SEQ ID NO: 625 - DNA, 999 bp, Artificial Sequence; identical to SEQ ID NO: 14
  Description of Artificial Sequence: Synthetic polynucleotide

SEQ ID NO: 626 - protein, 333 aa, Artificial Sequence; identical to SEQ ID NO: 15
  Description of Artificial Sequence: Synthetic polypeptide

SEQ ID NO: 627 - DNA, 9 bp, Artificial Sequence
  Description of Artificial Sequence: Synthetic oligonucleotide
gggagtggg

SEQ ID NO: 628 - protein, 3 aa, Artificial Sequence
  Description of Artificial Sequence: Synthetic peptide
GSG

SEQ ID NO: 629 - DNA, 57 bp, Artificial Sequence; identical to SEQ ID NO: 613
  Description of Artificial Sequence: Synthetic oligonucleotide

SEQ ID NO: 630 - protein, 19 aa, Artificial Sequence
  Description of Artificial Sequence: Synthetic peptide
ATNFSLLKQAGDVEENPGP

SEQ ID NO: 631 - DNA, 261 bp, Artificial Sequence
  Description of Artificial Sequence: Synthetic polynucleotide
tggcatgaaggtctggaagaagcttctcgcctttattttggcgaacggaacgtaaaaggtatgtttgaagtcctggagccattgcacgccatgatggagcgcgggcctcagaccctcaaggaaaccagttttaatcaggcctatgggcgagacctcatggaggcacaggaatggtgtcggaagtatatgaagtccggcaacgttaaggatctcttgcaggcctgggacttgtattatcacgtgttccggcgaatcagcaag

SEQ ID NO: 632 - protein, 87 aa, Artificial Sequence; identical to SEQ ID NO: 431
  Description of Artificial Sequence: Synthetic polypeptide

SEQ ID NO: 633 - DNA, 6 bp, Artificial Sequence
  Description of Artificial Sequence: Synthetic oligonucleotide
cgtacg

SEQ ID NO: 634 - protein, 2 aa, Artificial Sequence
  Description of Artificial Sequence: Synthetic peptide
RT

SEQ ID NO: 635 - DNA, 264 bp, Artificial Sequence; identical to SEQ ID NO: 615
  Description of Artificial Sequence: Synthetic polynucleotide

SEQ ID NO: 636 - protein, 87 aa, Artificial Sequence; identical to SEQ ID NO: 431
  Description of Artificial Sequence: Synthetic polypeptide

SEQ ID NO: 637 - DNA, 330 bp, Artificial Sequence; identical to SEQ ID NO: 591
  Description of Artificial Sequence: Synthetic polynucleotide

SEQ ID NO: 638 - protein, 110 aa, Artificial Sequence; identical to SEQ ID NO: 36
  Description of Artificial Sequence: Synthetic polypeptide

SEQ ID NO: 639 - DNA, 18 bp, Artificial Sequence
  Description of Artificial Sequence: Synthetic oligonucleotide
tctggcggtggatccgga

SEQ ID NO: 640 - protein, 6 aa, Artificial Sequence
  Description of Artificial Sequence: Synthetic peptide
SGGGSG

SEQ ID NO: 641 - DNA, 864 bp, Artificial Sequence; identical to SEQ ID NO: 44
  Description of Artificial Sequence: Synthetic polynucleotide

SEQ ID NO: 642 - protein, 288 aa, Artificial Sequence; identical to SEQ ID NO: 45
  Description of Artificial Sequence: Synthetic polypeptide

SEQ ID NO: 643 - DNA, 54 bp, Artificial Sequence; identical to SEQ ID NO: 313
  Description of Artificial Sequence: Synthetic oligonucleotide

SEQ ID NO: 644 - protein, 18 aa, Artificial Sequence
  Description of Artificial Sequence: Synthetic peptide
EGRGSLLTCGDVEENPGP

SEQ ID NO: 645 - DNA, 999 bp, Artificial Sequence; identical to SEQ ID NO: 14
  Description of Artificial Sequence: Synthetic polynucleotide

SEQ ID NO: 646 - protein, 333 aa, Artificial Sequence; identical to SEQ ID NO: 15
  Description of Artificial Sequence: Synthetic polypeptide

SEQ ID NO: 647 - DNA, 9 bp, Artificial Sequence
  Description of Artificial Sequence: Synthetic oligonucleotide
gggagtggg

SEQ ID NO: 648 - protein, 3 aa, Artificial Sequence
  Description of Artificial Sequence: Synthetic peptide
GSG

SEQ ID NO: 649 - DNA, 57 bp, Artificial Sequence; identical to SEQ ID NO: 613
  Description of Artificial Sequence: Synthetic oligonucleotide

SEQ ID NO: 650 - protein, 19 aa, Artificial Sequence
  Description of Artificial Sequence: Synthetic peptide
ATNFSLLKQAGDVEENPGP

SEQ ID NO: 651 - DNA, 261 bp, Artificial Sequence; identical to SEQ ID NO: 631
  Description of Artificial Sequence: Synthetic polynucleotide

SEQ ID NO: 652 - protein, 87 aa, Artificial Sequence; identical to SEQ ID NO: 431
  Description of Artificial Sequence: Synthetic polypeptide

SEQ ID NO: 653 - DNA, 6 bp, Artificial Sequence
  Description of Artificial Sequence: Synthetic oligonucleotide
cgtacg

SEQ ID NO: 654 - protein, 2 aa, Artificial Sequence
  Description of Artificial Sequence: Synthetic peptide
RT

SEQ ID NO: 655 - DNA, 261 bp, Artificial Sequence
  Description of Artificial Sequence: Synthetic polynucleotide
tggcacgaaggtctggacgaggctagtagactgtatttcggcgagagaaatgtaaagggaatgttcgaggtactggagcctctgcacgccatgatggaacgcggccctcagacactcaaggagactagttttaaccaggcctatggcagggatctgatggaggctcaggaatggtgccggaagtatatgaaaagcggtaacgtgaaggacctgctgcaggcctgggatctgtattatcacgtgtttagaagaatctctaaa

SEQ ID NO: 656 - protein, 87 aa, Artificial Sequence
  Description of Artificial Sequence: Synthetic polypeptide
WHEGLDEASRLYFGERNVKGMFEVLEPLHAMMERGPQTLKETSFNQAYGRDLMEAQEWCRKYMKSGNVKDLLQAWDLYYHVFRRISK

SEQ ID NO: 657 - DNA, 6 bp, Artificial Sequence
  Description of Artificial Sequence: Synthetic oligonucleotide
cgtacg

SEQ ID NO: 658 - protein, 2 aa, Artificial Sequence
  Description of Artificial Sequence: Synthetic peptide
RT

SEQ ID NO: 659 - DNA, 264 bp, Artificial Sequence; identical to SEQ ID NO: 615
  Description of Artificial Sequence: Synthetic polynucleotide

SEQ ID NO: 660 - protein, 87 aa, Artificial Sequence; identical to SEQ ID NO: 431
  Description of Artificial Sequence: Synthetic polypeptide

SEQ ID NO: 661 - DNA, 261 bp, Artificial Sequence
  Description of Artificial Sequence: Synthetic polynucleotide
tggcacgaggggctggaggaggcaagtcgactgtattttggagaacgcaacgtaaagggaatgtttgaggtgctcgaaccactccatgctatgatggaaagggggcctcagactcttaaggaaacaagttttaatcaagcctacggacgagacctcatggaggcgcaggagtggtgcagaaaatacatgaaatcaggtaatgttaaggacctgctgcaggcatgggacctgtactaccatgtcttcaggcgcatctcaaag

SEQ ID NO: 662 - protein, 87 aa, Artificial Sequence; identical to SEQ ID NO: 431
  Description of Artificial Sequence: Synthetic polypeptide

SEQ ID NO: 663 - DNA, 30 bp, Artificial Sequence
  Description of Artificial Sequence: Synthetic oligonucleotide
atgcattctggtggaggatcaggcgttgaa

SEQ ID NO: 664 - protein, 10 aa, Artificial Sequence
  Description of Artificial Sequence: Synthetic peptide
MHSGGGSGVE

SEQ ID NO: 665 - DNA, 513 bp, Artificial Sequence
  Description of Artificial Sequence: Synthetic polynucleotide
gcagctggaggccctggcgcaggctctgcagcccctgtatctagcacctcttctcttcctctggctgcgctgaacatgagagtgcggagacggttgtctttgttcttgaatgtcagaacacaggttgcagcggactggaccgctctggccgaggaaatggacttcgagtacctggagatcaggcaactcgaaacgcaggcagatcctacaggcagactgttggatgcgtggcagggacggcccggagccagcgttggacggctccttgatcttctcaccaagctgggcagagatgacgtgctgctggaattgggccccagtattgaggaggactgccaaaaatacatcttgaagcagcaacaggaggaggcggagaagcccctccaggtcgcagccgtcgattcatccgtgcctagaacagccgaacttgcaggcatcactaccctggatgatcccctgggccatatgccagagaggtttgatgcgtttatctgctattgcccaagcgatatc

SEQ ID NO: 666 - protein, 171 aa, Artificial Sequence; identical to SEQ ID NO: 214
  Description of Artificial Sequence: Synthetic polypeptide

SEQ ID NO: 667 - DNA, 6 bp, Artificial Sequence
  Description of Artificial Sequence: Synthetic oligonucleotide
gttgag

SEQ ID NO: 668 - protein, 2 aa, Artificial Sequence
  Description of Artificial Sequence: Synthetic peptide
VE

SEQ ID NO: 669 - DNA, 186 bp, Artificial Sequence
  Description of Artificial Sequence: Synthetic polynucleotide
aagaaggtggccaagaagccaaccaataaagctccacatcctaaacaggagccacaagaaatcaactttccagatgatctccctggctctaatactgcagcccccgtgcaggaaaccctgcacggctgtcaacctgtgacacaggaagacgggaaggaaagcaggatatccgtgcaggaacggcaa

SEQ ID NO: 670 - protein, 62 aa, Artificial Sequence; identical to SEQ ID NO: 216
  Description of Artificial Sequence: Synthetic polypeptide

SEQ ID NO: 671 - DNA, 6 bp, Artificial Sequence
  Description of Artificial Sequence: Synthetic oligonucleotide
gtcgac

SEQ ID NO: 672 - protein, 2 aa, Artificial Sequence
  Description of Artificial Sequence: Synthetic peptide
VD

SEQ ID NO: 673 - DNA, 27 bp, Artificial Sequence
  Description of Artificial Sequence: Synthetic oligonucleotide
tacccatacgacgtgccagattatgct

SEQ ID NO: 674 - protein, 9 aa, Artificial Sequence
  Description of Artificial Sequence: Synthetic peptide
YPYDVPDYA

SEQ ID NO: 675 - DNA, 6 bp, Artificial Sequence
  Description of Artificial Sequence: Synthetic oligonucleotide
ccgcgg

SEQ ID NO: 676 - protein, 2 aa, Artificial Sequence
  Description of Artificial Sequence: Synthetic peptide
PR

SEQ ID NO: 677 - DNA, 54 bp, Artificial Sequence; identical to SEQ ID NO: 138
  Description of Artificial Sequence: Synthetic oligonucleotide

SEQ ID NO: 678 - protein, 18 aa, Artificial Sequence
  Description of Artificial Sequence: Synthetic peptide
EGRGSLLTCGDVEENPGP

SEQ ID NO: 679 - DNA, 1002 bp, Artificial Sequence; identical to SEQ ID NO: 309
  Description of Artificial Sequence: Synthetic polynucleotide

SEQ ID NO: 680 - protein, 333 aa, Artificial Sequence; identical to SEQ ID NO: 15
  Description of Artificial Sequence: Synthetic polypeptide

SEQ ID NO: 681 - DNA, 9 bp, Artificial Sequence
  Description of Artificial Sequence: Synthetic oligonucleotide
atgctcgag

SEQ ID NO: 682 - protein, 3 aa, Artificial Sequence
  Description of Artificial Sequence: Synthetic peptide
MLE

SEQ ID NO: 683 - DNA, 261 bp, Artificial Sequence; identical to SEQ ID NO: 661
  Description of Artificial Sequence: Synthetic polynucleotide

SEQ ID NO: 684 - protein, 87 aa, Artificial Sequence; identical to SEQ ID NO: 431
  Description of Artificial Sequence: Synthetic polypeptide

SEQ ID NO: 685 - DNA, 6 bp, Artificial Sequence
  Description of Artificial Sequence: Synthetic oligonucleotide
atgcat

SEQ ID NO: 686 - protein, 2 aa, Artificial Sequence
  Description of Artificial Sequence: Synthetic peptide
MH

SEQ ID NO: 687 - DNA, 261 bp, Artificial Sequence; identical to SEQ ID NO: 430
  Description of Artificial Sequence: Synthetic polynucleotide

SEQ ID NO: 688 - protein, 87 aa, Artificial Sequence; identical to SEQ ID NO: 431
  Description of Artificial Sequence: Synthetic polypeptide

SEQ ID NO: 689 - DNA, 30 bp, Artificial Sequence; identical to SEQ ID NO: 663
  Description of Artificial Sequence: Synthetic oligonucleotide

SEQ ID NO: 690 - protein, 10 aa, Artificial Sequence
  Description of Artificial Sequence: Synthetic peptide
MHSGGGSGVE

SEQ ID NO: 691 - DNA, 513 bp, Artificial Sequence; identical to SEQ ID NO: 665
  Description of Artificial Sequence: Synthetic polynucleotide

SEQ ID NO: 692 - protein, 171 aa, Artificial Sequence; identical to SEQ ID NO: 214
  Description of Artificial Sequence: Synthetic polypeptide

SEQ ID NO: 693 - DNA, 6 bp, Artificial Sequence
  Description of Artificial Sequence: Synthetic oligonucleotide
gttgag

SEQ ID NO: 694 - protein, 2 aa, Artificial Sequence
  Description of Artificial Sequence: Synthetic peptide
VE

SEQ ID NO: 695 - DNA, 186 bp, Artificial Sequence; identical to SEQ ID NO: 669
  Description of Artificial Sequence: Synthetic polynucleotide

SEQ ID NO: 696 - protein, 62 aa, Artificial Sequence; identical to SEQ ID NO: 216
  Description of Artificial Sequence: Synthetic polypeptide

SEQ ID NO: 697 - DNA, 6 bp, Artificial Sequence
  Description of Artificial Sequence: Synthetic oligonucleotide
gtcgac

SEQ ID NO: 698 - protein, 2 aa, Artificial Sequence
  Description of Artificial Sequence: Synthetic peptide
VD

SEQ ID NO: 699 - DNA, 27 bp, Artificial Sequence
  Description of Artificial Sequence: Synthetic oligonucleotide
tacccatacgacgtgccagattatgct

SEQ ID NO: 700 - protein, 9 aa, Artificial Sequence
  Description of Artificial Sequence: Synthetic peptide
YPYDVPDYA

SEQ ID NO: 701 - DNA, 6 bp, Artificial Sequence
  Description of Artificial Sequence: Synthetic oligonucleotide
ccgcgg

SEQ ID NO: 702 - protein, 2 aa, Artificial Sequence
  Description of Artificial Sequence: Synthetic peptide
PR

SEQ ID NO: 703 - DNA, 54 bp, Artificial Sequence; identical to SEQ ID NO: 138
  Description of Artificial Sequence: Synthetic oligonucleotide

SEQ ID NO: 704 - protein, 18 aa, Artificial Sequence
  Description of Artificial Sequence: Synthetic peptide
EGRGSLLTCGDVEENPGP

SEQ ID NO: 705 - DNA, 1002 bp, Artificial Sequence; identical to SEQ ID NO: 309
  Description of Artificial Sequence: Synthetic polynucleotide

SEQ ID NO: 706 - protein, 333 aa, Artificial Sequence; identical to SEQ ID NO: 15
  Description of Artificial Sequence: Synthetic polypeptide

SEQ ID NO: 707 - DNA, 63 bp, Artificial Sequence; identical to SEQ ID NO: 142
  Description of Artificial Sequence: Synthetic oligonucleotide

SEQ ID NO: 708 - protein, 21 aa, Artificial Sequence
  Description of Artificial Sequence: Synthetic peptide
MEFGLSWLFLVAILKGVQCSR

SEQ ID NO: 709 - DNA, 327 bp, Artificial Sequence; identical to SEQ ID NO: 164
  Description of Artificial Sequence: Synthetic polynucleotide

SEQ ID NO: 710 - protein, 109 aa, Artificial Sequence; identical to SEQ ID NO: 165
  Description of Artificial Sequence: Synthetic polypeptide

SEQ ID NO: 711 - DNA, 24 bp, Artificial Sequence
  Description of Artificial Sequence: Synthetic oligonucleotide
ggcggaggaagcggaggtgggggc

SEQ ID NO: 712 - protein, 8 aa, Artificial Sequence
  Description of Artificial Sequence: Synthetic peptide
GGGSGGGG

SEQ ID NO: 713 - DNA, 357 bp, Artificial Sequence; identical to SEQ ID NO: 168
  Description of Artificial Sequence: Synthetic polynucleotide

SEQ ID NO: 714 - protein, 119 aa, Artificial Sequence; identical to SEQ ID NO: 169
  Description of Artificial Sequence: Synthetic polypeptide

SEQ ID NO: 715 - DNA, 6 bp, Artificial Sequence
  Description of Artificial Sequence: Synthetic oligonucleotide
ggatcc

SEQ ID NO: 716 - protein, 2 aa, Artificial Sequence
  Description of Artificial Sequence: Synthetic peptide
GS

SEQ ID NO: 717 - DNA, 48 bp, Artificial Sequence; identical to SEQ ID NO: 152
  Description of Artificial Sequence: Synthetic oligonucleotide

SEQ ID NO: 718 - protein, 16 aa, Artificial Sequence
  Description of Artificial Sequence: Synthetic peptide
ELPTQGTFSNVSTNVS

SEQ ID NO: 719 - DNA, 126 bp, Artificial Sequence; identical to SEQ ID NO: 154
  Description of Artificial Sequence: Synthetic polynucleotide

SEQ ID NO: 720 - protein, 42 aa, Artificial Sequence; identical to SEQ ID NO: 155
  Description of Artificial Sequence: Synthetic polypeptide

SEQ ID NO: 721 - DNA, 111 bp, Artificial Sequence; identical to SEQ ID NO: 156
  Description of Artificial Sequence: Synthetic polynucleotide

SEQ ID NO: 722 - protein, 37 aa, Artificial Sequence; identical to SEQ ID NO: 157
  Description of Artificial Sequence: Synthetic polypeptide

SEQ ID NO: 723 - DNA, 6 bp, Artificial Sequence
  Description of Artificial Sequence: Synthetic oligonucleotide
ctcgag

SEQ ID NO: 724 - protein, 2 aa, Artificial Sequence
  Description of Artificial Sequence: Synthetic peptide
LE

SEQ ID NO: 725 - DNA, 335 bp, Artificial Sequence
  Description of Artificial Sequence: Synthetic polynucleotide
agagtgaagttcagcaggagcgcagacgcccccgcgtaccagcagggccagaaccagctctataacgagctcaatctaggacgaagagaggagtacgatgttttggacaagagacgtggccgggaccctgagatggggggaaagccgagaaggaagaaccctcaggaaggcctgtacaatgaactgcagaaagataagatggcggaggcctacagtgagattgggatgaaaggcgagcgccggaggggcaaggggcacgatggcctttaccagggtctcagtacagccaccaaggacacctacgacgcccttcacatgcaagctcttccacctcg

SEQ ID NO: 726 - protein, 111 aa, Artificial Sequence
  Description of Artificial Sequence: Synthetic polypeptide
RVKFSRSADAPAYQQGQNQLYNELNLGRREEYDVLDKRRGRDPEMGGKPRRKNPQEGLYNELQKDKMAEAYSEIGMKGERRRGKGHDGLYQGLSTATKDTYDALHMQALPP

SEQ ID NO: 727 - DNA, 24 bp, Artificial Sequence
  Description of Artificial Sequence: Synthetic oligonucleotide
tcaggcggtggctcaggtgttaac

SEQ ID NO: 728 - protein, 8 aa, Artificial Sequence
  Description of Artificial Sequence: Synthetic peptide
SGGGSGVN

SEQ ID NO: 729 - DNA, 321 bp, Artificial Sequence; identical to SEQ ID NO: 573
  Description of Artificial Sequence: Synthetic polynucleotide

SEQ ID NO: 730 - protein, 107 aa, Artificial Sequence; identical to SEQ ID NO: 532
  Description of Artificial Sequence: Synthetic polypeptide

SEQ ID NO: 731 - DNA, 6 bp, Artificial Sequence
  Description of Artificial Sequence: Synthetic oligonucleotide
gttaac

SEQ ID NO: 732 - protein, 2 aa, Artificial Sequence
  Description of Artificial Sequence: Synthetic peptide
VN

SEQ ID NO: 733 - DNA, 321 bp, Artificial Sequence; identical to SEQ ID NO: 577
  Description of Artificial Sequence: Synthetic polynucleotide

SEQ ID NO: 734 - protein, 107 aa, Artificial Sequence; identical to SEQ ID NO: 532
  Description of Artificial Sequence: Synthetic polypeptide

SEQ ID NO: 735 - DNA, 9 bp, Artificial Sequence
  Description of Artificial Sequence: Synthetic oligonucleotide
ggatcggga

SEQ ID NO: 736 - protein, 3 aa, Artificial Sequence
  Description of Artificial Sequence: Synthetic peptide
GSG

SEQ ID NO: 737 - DNA, 57 bp, Artificial Sequence
  Description of Artificial Sequence: Synthetic oligonucleotide
gctactaacttcagcctgctgaagcaggctggagacgtggaggagaaccccgggcct

SEQ ID NO: 738 - protein, 19 aa, Artificial Sequence
  Description of Artificial Sequence: Synthetic peptide
ATNFSLLKQAGDVEENPGP

SEQ ID NO: 739 - DNA, 261 bp, Artificial Sequence; identical to SEQ ID NO: 547
  Description of Artificial Sequence: Synthetic polynucleotide

SEQ ID NO: 740 - protein, 87 aa, Artificial Sequence; identical to SEQ ID NO: 431
  Description of Artificial Sequence: Synthetic polypeptide

SEQ ID NO: 741 - DNA, 6 bp, Artificial Sequence
  Description of Artificial Sequence: Synthetic oligonucleotide
gtcgag

SEQ ID NO: 742 - protein, 2 aa, Artificial Sequence
  Description of Artificial Sequence: Synthetic peptide
VE

SEQ ID NO: 743 - DNA, 261 bp, Artificial Sequence; identical to SEQ ID NO: 531
  Description of Artificial Sequence: Synthetic polynucleotide

SEQ ID NO: 744 - protein, 87 aa, Artificial Sequence; identical to SEQ ID NO: 431
  Description of Artificial Sequence: Synthetic polypeptide

SEQ ID NO: 745 - DNA, 18 bp, Artificial Sequence
  Description of Artificial Sequence: Synthetic oligonucleotide
tcaggcggtggctcaggt

SEQ ID NO: 746 - protein, 6 aa, Artificial Sequence
  Description of Artificial Sequence: Synthetic peptide
SGGGSG

SEQ ID NO: 747 - DNA, 921 bp, Artificial Sequence; identical to SEQ ID NO: 523
  Description of Artificial Sequence: Synthetic polynucleotide

SEQ ID NO: 748 - protein, 306 aa, Artificial Sequence
  Description of Artificial Sequence: Synthetic polypeptide
VDGFGDVGALESLRGNADLAYILSMEPCGHCLIINNVNFCRESGLRTRTGSNIDCEKLRRRFSSLHFMVEVKGDLTAKKMVLALLELARQDHGALDCCVVVILSHGCQASHLQFPGAVYGTDGCPVSVEKIVNIFNGTSCPSLGGKPKLFFIQACGGEQKDHGFEVASTSPEDESPGSNPEPDATPFQEGLRTFDQLDAISSLPTPSDIFVSYSTFPGFVSWRDPKSGSWYVETLDDIFEQWAHSEDLQSLLLRVANAVSVKGIYKQMPGCFNFLRKKLFFKTSASRAEGRGSLLTCGDVEENPGP

SEQ ID NO: 749 - DNA, 516 bp, Artificial Sequence; identical to SEQ ID NO: 251
  Description of Artificial Sequence: Synthetic polynucleotide

SEQ ID NO: 750 - protein, 172 aa, Artificial Sequence; identical to SEQ ID NO: 240
  Description of Artificial Sequence: Synthetic polypeptide

SEQ ID NO: 751 - DNA, 6 bp, Artificial Sequence
  Description of Artificial Sequence: Synthetic oligonucleotide
gtcgag

SEQ ID NO: 752 - protein, 2 aa, Artificial Sequence
  Description of Artificial Sequence: Synthetic peptide
VG

SEQ ID NO: 753 - DNA, 186 bp, Artificial Sequence; identical to SEQ ID NO: 255
  Description of Artificial Sequence: Synthetic polynucleotide

SEQ ID NO: 754 - protein, 62 aa, Artificial Sequence; identical to SEQ ID NO: 216
  Description of Artificial Sequence: Synthetic polypeptide

SEQ ID NO: 755 - DNA, 6 bp, Artificial Sequence
  Description of Artificial Sequence: Synthetic oligonucleotide
gtcgag

SEQ ID NO: 756 - protein, 2 aa, Artificial Sequence
  Description of Artificial Sequence: Synthetic peptide
VG

SEQ ID NO: 757 - DNA, 321 bp, Artificial Sequence
  Description of Artificial Sequence: Synthetic polynucleotide
ggcgtccaagtcgaaaccattagtcccggcgatggcagaacatttcctaaaaggggacaaacatgtgtcgtccattatacaggcatgttggaggacggcaaaaaggtggacagtagtagagatcgcaataaacctttcaaattcatgttgggaaaacaagaagtcattaggggatgggaggagggcgtggctcaaatgtccgtcggccaacgcgctaagctcaccatcagccccgactacgcatacggcgctaccggacatcccggaattattccccctcacgctaccttggtgtttgacgtcgaactgttgaagctcgaa

SEQ ID NO: 758 - protein, 107 aa, Artificial Sequence; identical to SEQ ID NO: 3
  Description of Artificial Sequence: Synthetic polypeptide

SEQ ID NO: 759 - DNA, 6 bp, Artificial Sequence
  Description of Artificial Sequence: Synthetic oligonucleotide
gtcgag

SEQ ID NO: 760 - protein, 2 aa, Artificial Sequence
  Description of Artificial Sequence: Synthetic peptide
VG

SEQ ID NO: 761 - DNA, 321 bp, Artificial Sequence
  Description of Artificial Sequence: Synthetic polynucleotide
ggagtgcaggtggagactatctccccaggagacgggcgcaccttccccaagcgcggccagacctgcgtggtgcactacaccgggatgcttgaagatggaaagaaagttgattcctcccgggacagaaacaagccctttaagtttatgctaggcaagcaggaggtgatccgaggctgggaagaaggggttgcccagatgagtgtgggtcagagagccaaactgactatatctccagattatgcctatggtgccactgggcacccaggcatcatcccaccacatgccactctcgtcttcgatgtggagcttctaaaactggaa

SEQ ID NO: 762 - protein, 107 aa, Artificial Sequence; identical to SEQ ID NO: 3
  Description of Artificial Sequence: Synthetic polypeptide

SEQ ID NO: 763 - DNA, 6 bp, Artificial Sequence
  Description of Artificial Sequence: Synthetic oligonucleotide
ccgcgg

SEQ ID NO: 764 - protein, 2 aa, Artificial Sequence
  Description of Artificial Sequence: Synthetic peptide
PR

SEQ ID NO: 765 - DNA, 54 bp, Artificial Sequence; identical to SEQ ID NO: 138
  Description of Artificial Sequence: Synthetic oligonucleotide

SEQ ID NO: 766 - protein, 18 aa, Artificial Sequence
  Description of Artificial Sequence: Synthetic peptide
EGRGSLLTCGDVEENPGP

SEQ ID NO: 767 - DNA, 1002 bp, Artificial Sequence; identical to SEQ ID NO: 309
  Description of Artificial Sequence: Synthetic polynucleotide

SEQ ID NO: 768 - protein, 333 aa, Artificial Sequence; identical to SEQ ID NO: 15
  Description of Artificial Sequence: Synthetic polypeptide

SEQ ID NO: 769 - DNA, 42 bp, Artificial Sequence; identical to SEQ ID NO: 247
  Description of Artificial Sequence: Synthetic oligonucleotide

SEQ ID NO: 770 - protein, 14 aa, Artificial Sequence
  Description of Artificial Sequence: Synthetic peptide
MGSSKSKPKDPSQR

SEQ ID NO: 771 - DNA, 6 bp, Artificial Sequence
  Description of Artificial Sequence: Synthetic oligonucleotide
ctcgac

SEQ ID NO: 772 - protein, 2 aa, Artificial Sequence
  Description of Artificial Sequence: Synthetic peptide
LN

SEQ ID NO: 773 - DNA, 516 bp, Artificial Sequence; identical to SEQ ID NO: 251
  Description of Artificial Sequence: Synthetic polynucleotide

SEQ ID NO: 774 - protein, 172 aa, Artificial Sequence; identical to SEQ ID NO: 240
  Description of Artificial Sequence: Synthetic polypeptide

SEQ ID NO: 775 - DNA, 6 bp, Artificial Sequence
  Description of Artificial Sequence: Synthetic oligonucleotide
gtcgag

SEQ ID NO: 776 - protein, 2 aa, Artificial Sequence
  Description of Artificial Sequence: Synthetic peptide
VG

SEQ ID NO: 777 - DNA, 186 bp, Artificial Sequence; identical to SEQ ID NO: 255
  Description of Artificial Sequence: Synthetic polynucleotide

SEQ ID NO: 778 - protein, 62 aa, Artificial Sequence; identical to SEQ ID NO: 216
  Description of Artificial Sequence: Synthetic polypeptide

SEQ ID NO: 779 - DNA, 6 bp, Artificial Sequence
  Description of Artificial Sequence: Synthetic oligonucleotide
gtcgag

SEQ ID NO: 780 - protein, 2 aa, Artificial Sequence
  Description of Artificial Sequence: Synthetic peptide
VG

SEQ ID NO: 781 - DNA, 321 bp, Artificial Sequence; identical to SEQ ID NO: 757
  Description of Artificial Sequence: Synthetic polynucleotide

SEQ ID NO: 782 - protein, 107 aa, Artificial Sequence; identical to SEQ ID NO: 3
  Description of Artificial Sequence: Synthetic polypeptide

SEQ ID NO: 783 - DNA, 6 bp, Artificial Sequence
  Description of Artificial Sequence: Synthetic oligonucleotide
gtcgag

SEQ ID NO: 784 - protein, 2 aa, Artificial Sequence
  Description of Artificial Sequence: Synthetic peptide
VG

SEQ ID NO: 785 - DNA, 321 bp, Artificial Sequence; identical to SEQ ID NO: 761
  Description of Artificial Sequence: Synthetic polynucleotide

SEQ ID NO: 786 - protein, 107 aa, Artificial Sequence; identical to SEQ ID NO: 3
  Description of Artificial Sequence: Synthetic polypeptide

SEQ ID NO: 787 - DNA, 6 bp, Artificial Sequence
  Description of Artificial Sequence: Synthetic oligonucleotide
ccgcgg

SEQ ID NO: 788 - protein, 2 aa, Artificial Sequence
  Description of Artificial Sequence: Synthetic peptide
PR

SEQ ID NO: 789 - DNA, 54 bp, Artificial Sequence; identical to SEQ ID NO: 138
  Description of Artificial Sequence: Synthetic oligonucleotide

SEQ ID NO: 790 - protein, 18 aa, Artificial Sequence
  Description of Artificial Sequence: Synthetic peptide
EGRGSLLTCGDVEENPGP

SEQ ID NO: 791 - DNA, 1002 bp, Artificial Sequence; identical to SEQ ID NO: 309
  Description of Artificial Sequence: Synthetic polynucleotide

SEQ ID NO: 792 - protein, 333 aa, Artificial Sequence; identical to SEQ ID NO: 15
  Description of Artificial Sequence: Synthetic polypeptide

SEQ ID NO: 793 - DNA, 261 bp, Artificial Sequence; identical to SEQ ID NO: 547
  Description of Artificial Sequence: Synthetic polynucleotide

SEQ ID NO: 794 - protein, 87 aa, Artificial Sequence; identical to SEQ ID NO: 431
  Description of Artificial Sequence: Synthetic polypeptide

SEQ ID NO: 795 - DNA, 6 bp, Artificial Sequence
  Description of Artificial Sequence: Synthetic oligonucleotide
gtcgag

SEQ ID NO: 796 - protein, 2 aa, Artificial Sequence
  Description of Artificial Sequence: Synthetic peptide
VG

SEQ ID NO: 797 - DNA, 261 bp, Artificial Sequence; identical to SEQ ID NO: 531
  Description of Artificial Sequence: Synthetic polynucleotide

SEQ ID NO: 798 - protein, 87 aa, Artificial Sequence; identical to SEQ ID NO: 431
  Description of Artificial Sequence: Synthetic polypeptide

SEQ ID NO: 799 - DNA, 18 bp, Artificial Sequence
  Description of Artificial Sequence: Synthetic oligonucleotide
tcaggcggtggctcaggt

SEQ ID NO: 800 - protein, 6 aa, Artificial Sequence
  Description of Artificial Sequence: Synthetic peptide
SGGGSG

SEQ ID NO: 801 - DNA, 863 bp, Artificial Sequence
  Description of Artificial Sequence: Synthetic polynucleotide
tcgacggatttggtgatgtcggtgctcttgagagtttgaggggaaatgcagatttggcttacatcctgagcatggagccctgtggccactgcctcattatcaacaatgtgaacttctgccgtgagtccgggctccgcacccgcactggctccaacatcgactgtgagaagttgcggcgtcgcttctcctcgctgcatttcatggtggaggtgaagggcgacctgactgccaagaaaatggtgctggctttgctggagctggcgcggcaggaccacggtgctctggactgctgcgtggtggtcattctctctcacggctgtcaggccagccacctgcagttcccaggggctgtctacggcacagatggatgccctgtgtcggtcgagaagattgtgaacatcttcaatgggaccagctgccccagcctgggagggaagcccaagctctttttcatccaggcctgtggtggggagcagaaagaccatgggtttgaggtggcctccacttcccctgaagacgagtcccctggcagtaaccccgagccagatgccaccccgttccaggaaggtttgaggaccttcgaccagctggacgccatatctagtttgcccacacccagtgacatctttgtgtcctactctactttcccaggttttgtttcctggagggaccccaagagtggctcctggtacgttgagaccctggacgacatctttgagcagtgggctcactctgaagacctgcagtccctcctgcttagggtcgctaatgctgtttcggtgaaagggatttataaacagatgcctggttgctttaatttcctccggaaaaaacttttctttaaaacatcagctagcagagcc

SEQ ID NO: 802 - protein, 287 aa, Artificial Sequence; identical to SEQ ID NO: 536
  Description of Artificial Sequence: Synthetic polypeptide

SEQ ID NO: 803 - DNA, 6 bp, Artificial Sequence
  Description of Artificial Sequence: Synthetic oligonucleotide
ccgcgg

SEQ ID NO: 804 - protein, 2 aa, Artificial Sequence
  Description of Artificial Sequence: Synthetic peptide
PR

SEQ ID NO: 805 - DNA, 54 bp, Artificial Sequence; identical to SEQ ID NO: 138
  Description of Artificial Sequence: Synthetic oligonucleotide

SEQ ID NO: 806 - protein, 18 aa, Artificial Sequence
  Description of Artificial Sequence: Synthetic peptide
EGRGSLLTCGDVEENPGP

SEQ ID NO: 807 - DNA, 63 bp, Artificial Sequence
  Description of Artificial Sequence: Synthetic oligonucleotide
atggaatttggcctctcctggttgtttctcgtggccattcttaagggtgtgcagtgctccaga

SEQ ID NO: 808 - protein, 21 aa, Artificial Sequence
  Description of Artificial Sequence: Synthetic peptide
MEFGLSWLFLVAILKGVQCSR

SEQ ID NO: 809 - DNA, 6 bp, Artificial Sequence
  Description of Artificial Sequence: Synthetic oligonucleotide
atgcat

SEQ ID NO: 810 - protein, 2 aa, Artificial Sequence
  Description of Artificial Sequence: Synthetic peptide
MH

SEQ ID NO: 811 - DNA, 48 bp, Artificial Sequence; identical to SEQ ID NO: 152
  Description of Artificial Sequence: Synthetic oligonucleotide

SEQ ID NO: 812 - protein, 16 aa, Artificial Sequence
  Description of Artificial Sequence: Synthetic peptide
ELPTQGTFSNVSTNVS

SEQ ID NO: 813 - DNA, 126 bp, Artificial Sequence; identical to SEQ ID NO: 154
  Description of Artificial Sequence: Synthetic polynucleotide

SEQ ID NO: 814 - protein, 42 aa, Artificial Sequence; identical to SEQ ID NO: 155
  Description of Artificial Sequence: Synthetic polypeptide

SEQ ID NO: 815 - DNA, 117 bp, Artificial Sequence
  Description of Artificial Sequence: Synthetic polynucleotide
atctatatctgggcacctctcgctggcacctgtggagtccttctgctcagcctggttattactctgtactgtaatcaccggaatcgccgccgcgtttgtaagtgtcccagggtcgac

SEQ ID NO: 816 - protein, 39 aa, Artificial Sequence
  Description of Artificial Sequence: Synthetic polypeptide
IYIWAPLAGTCGVLLLSLVITLYCNHRNRRRVCKCPRVD

SEQ ID NO: 817 - DNA, 335 bp, Artificial Sequence; identical to SEQ ID NO: 725
  Description of Artificial Sequence: Synthetic polynucleotide

SEQ ID NO: 818 - protein, 111 aa, Artificial Sequence; identical to SEQ ID NO: 726
  Description of Artificial Sequence: Synthetic polypeptide

SEQ ID NO: 819 - DNA, 516 bp, Artificial Sequence; identical to SEQ ID NO: 251
  Description of Artificial Sequence: Synthetic polynucleotide

SEQ ID NO: 820 - protein, 172 aa, Artificial Sequence; identical to SEQ ID NO: 240
  Description of Artificial Sequence: Synthetic polypeptide

SEQ ID NO: 821 - DNA, 6 bp, Artificial Sequence
  Description of Artificial Sequence: Synthetic oligonucleotide
gtcgag

SEQ ID NO: 822 - protein, 2 aa, Artificial Sequence
  Description of Artificial Sequence: Synthetic peptide
VE

SEQ ID NO: 823 - DNA, 186 bp, Artificial Sequence; identical to SEQ ID NO: 255
  Description of Artificial Sequence: Synthetic polynucleotide

SEQ ID NO: 824 - protein, 62 aa, Artificial Sequence; identical to SEQ ID NO: 216
  Description of Artificial Sequence: Synthetic polypeptide

SEQ ID NO: 825 - DNA, 6 bp, Artificial Sequence
  Description of Artificial Sequence: Synthetic oligonucleotide
gtcgag

SEQ ID NO: 826 - protein, 2 aa, Artificial Sequence
  Description of Artificial Sequence: Synthetic peptide
VE

SEQ ID NO: 827 - DNA, 321 bp, Artificial Sequence; identical to SEQ ID NO: 757
  Description of Artificial Sequence: Synthetic polynucleotide

SEQ ID NO: 828 - protein, 107 aa, Artificial Sequence; identical to SEQ ID NO: 3
  Description of Artificial Sequence: Synthetic polypeptide

SEQ ID NO: 829 - DNA, 6 bp, Artificial Sequence
  Description of Artificial Sequence: Synthetic oligonucleotide
gtcgag

SEQ ID NO: 830 - protein, 2 aa, Artificial Sequence
  Description of Artificial Sequence: Synthetic peptide
VE

SEQ ID NO: 831 - DNA, 321 bp, Artificial Sequence; identical to SEQ ID NO: 761
  Description of Artificial Sequence: Synthetic polynucleotide

SEQ ID NO: 832 - protein, 107 aa, Artificial Sequence; identical to SEQ ID NO: 3
  Description of Artificial Sequence: Synthetic polypeptide

SEQ ID NO: 833 - DNA, 6 bp, Artificial Sequence
  Description of Artificial Sequence: Synthetic oligonucleotide
ccgcgg

SEQ ID NO: 834 - protein, 2 aa, Artificial Sequence
  Description of Artificial Sequence: Synthetic peptide
PR

SEQ ID NO: 835 - DNA, 54 bp, Artificial Sequence; identical to SEQ ID NO: 138
  Description of Artificial Sequence: Synthetic oligonucleotide

SEQ ID NO: 836 - protein, 18 aa, Artificial Sequence
  Description of Artificial Sequence: Synthetic peptide
EGRGSLLTCGDVEENPGP

SEQ ID NO: 837 - DNA, 6 bp, Artificial Sequence
  Description of Artificial Sequence: Synthetic oligonucleotide
ccatgg

SEQ ID NO: 838 - protein, 2 aa, Artificial Sequence
  Description of Artificial Sequence: Synthetic peptide
PW

SEQ ID NO: 839 - DNA, 63 bp, Artificial Sequence; identical to SEQ ID NO: 142
  Description of Artificial Sequence: Synthetic oligonucleotide

SEQ ID NO: 840 - protein, 21 aa, Artificial Sequence
  Description of Artificial Sequence: Synthetic peptide
MEFGLSWLFLVAILKGVQCSR

SEQ ID NO: 841 - DNA, 321 bp, Artificial Sequence; identical to SEQ ID NO: 144
  Description of Artificial Sequence: Synthetic polynucleotide

SEQ ID NO: 842 - protein, 107 aa, Artificial Sequence; identical to SEQ ID NO: 145
  Description of Artificial Sequence: Synthetic polypeptide

SEQ ID NO: 843 - DNA, 24 bp, Artificial Sequence
  Description of Artificial Sequence: Synthetic oligonucleotide
ggcggaggaagcggaggtgggggc

SEQ ID NO: 844 - protein, 8 aa, Artificial Sequence
  Description of Artificial Sequence: Synthetic peptide
GGGSGGGG

SEQ ID NO: 845 - DNA, 360 bp, Artificial Sequence; identical to SEQ ID NO: 148
  Description of Artificial Sequence: Synthetic polynucleotide

SEQ ID NO: 846 - protein, 120 aa, Artificial Sequence; identical to SEQ ID NO: 149
  Description of Artificial Sequence: Synthetic polypeptide

SEQ ID NO: 847 - DNA, 6 bp, Artificial Sequence
  Description of Artificial Sequence: Synthetic oligonucleotide
ggatcc

SEQ ID NO: 848 - protein, 2 aa, Artificial Sequence
  Description of Artificial Sequence: Synthetic peptide
GS

SEQ ID NO: 849 - DNA, 48 bp, Artificial Sequence; identical to SEQ ID NO: 152
  Description of Artificial Sequence: Synthetic oligonucleotide

SEQ ID NO: 850 - protein, 16 aa, Artificial Sequence
  Description of Artificial Sequence: Synthetic peptide
ELPTQGTFSNVSTNVS

SEQ ID NO: 851 - DNA, 126 bp, Artificial Sequence; identical to SEQ ID NO: 154
  Description of Artificial Sequence: Synthetic polynucleotide

SEQ ID NO: 852 - protein, 42 aa, Artificial Sequence; identical to SEQ ID NO: 155
  Description of Artificial Sequence: Synthetic polypeptide

SEQ ID NO: 853 - DNA, 111 bp, Artificial Sequence; identical to SEQ ID NO: 156
  Description of Artificial Sequence: Synthetic polynucleotide

SEQ ID NO: 854 - protein, 37 aa, Artificial Sequence; identical to SEQ ID NO: 157
  Description of Artificial Sequence: Synthetic polypeptide

SEQ ID NO: 855 - DNA, 6 bp, Artificial Sequence
  Description of Artificial Sequence: Synthetic oligonucleotide
gtcgac

SEQ ID NO: 856 - protein, 2 aa, Artificial Sequence
  Description of Artificial Sequence: Synthetic peptide
VD

SEQ ID NO: 857 - DNA, 335 bp, Artificial Sequence; identical to SEQ ID NO: 725
  Description of Artificial Sequence: Synthetic polynucleotide

SEQ ID NO: 858 - protein, 111 aa, Artificial Sequence; identical to SEQ ID NO: 726
  Description of Artificial Sequence: Synthetic polypeptide

SEQ ID NO: 859 - DNA, 42 bp, Artificial Sequence; identical to SEQ ID NO: 247
  Description of Artificial Sequence: Synthetic oligonucleotide

SEQ ID NO: 860 - protein, 14 aa, Artificial Sequence
  Description of Artificial Sequence: Synthetic peptide
MGSSKSKPKDPSQR

SEQ ID NO: 861 - DNA, 6 bp, Artificial Sequence
  Description of Artificial Sequence: Synthetic oligonucleotide
ctcgac

SEQ ID NO: 862 - protein, 2 aa, Artificial Sequence
  Description of Artificial Sequence: Synthetic peptide
LD

SEQ ID NO: 863 - DNA, 516 bp, Artificial Sequence; identical to SEQ ID NO: 251
  Description of Artificial Sequence: Synthetic polynucleotide

SEQ ID NO: 864 - protein, 172 aa, Artificial Sequence; identical to SEQ ID NO: 240
  Description of Artificial Sequence: Synthetic polypeptide

SEQ ID NO: 865 - DNA, 6 bp, Artificial Sequence
  Description of Artificial Sequence: Synthetic oligonucleotide
gtcgag

SEQ ID NO: 866 - protein, 2 aa, Artificial Sequence
  Description of Artificial Sequence: Synthetic peptide
VE

SEQ ID NO: 867 - DNA, 186 bp, Artificial Sequence; identical to SEQ ID NO: 255
  Description of Artificial Sequence: Synthetic polynucleotide

SEQ ID NO: 868 - protein, 62 aa, Artificial Sequence; identical to SEQ ID NO: 216
  Description of Artificial Sequence: Synthetic polypeptide

SEQ ID NO: 869 - DNA, 6 bp, Artificial Sequence
  Description of Artificial Sequence: Synthetic oligonucleotide
gtcgag

SEQ ID NO: 870 - protein, 2 aa, Artificial Sequence
  Description of Artificial Sequence: Synthetic peptide
VE

SEQ ID NO: 871 - DNA, 321 bp, Artificial Sequence; identical to SEQ ID NO: 757
  Description of Artificial Sequence: Synthetic polynucleotide

SEQ ID NO: 872 - protein, 107 aa, Artificial Sequence; identical to SEQ ID NO: 3
  Description of Artificial Sequence: Synthetic polypeptide

SEQ ID NO: 873 - DNA, 6 bp, Artificial Sequence
  Description of Artificial Sequence: Synthetic oligonucleotide
gtcgag

SEQ ID NO: 874 - protein, 2 aa, Artificial Sequence
  Description of Artificial Sequence: Synthetic peptide
VE

SEQ ID NO: 875 - DNA, 321 bp, Artificial Sequence; identical to SEQ ID NO: 761
  Description of Artificial Sequence: Synthetic polynucleotide

SEQ ID NO: 876 - protein, 107 aa, Artificial Sequence; identical to SEQ ID NO: 3
  Description of Artificial Sequence: Synthetic polypeptide

SEQ ID NO: 877 - DNA, 6 bp, Artificial Sequence
  Description of Artificial Sequence: Synthetic oligonucleotide
ccgcgg

SEQ ID NO: 878 - protein, 2 aa, Artificial Sequence
  Description of Artificial Sequence: Synthetic peptide
PR

SEQ ID NO: 879 - DNA, 54 bp, Artificial Sequence; identical to SEQ ID NO: 138
  Description of Artificial Sequence: Synthetic oligonucleotide

SEQ ID NO: 880 - protein, 18 aa, Artificial Sequence
  Description of Artificial Sequence: Synthetic peptide
EGRGSLLTCGDVEENPGP

SEQ ID NO: 881 - DNA, 6 bp, Artificial Sequence
  Description of Artificial Sequence: Synthetic oligonucleotide
ccatgg

SEQ ID NO: 882 - protein, 2 aa, Artificial Sequence
  Description of Artificial Sequence: Synthetic peptide
PW

SEQ ID NO: 883 - DNA, 63 bp, Artificial Sequence; identical to SEQ ID NO: 142
  Description of Artificial Sequence: Synthetic oligonucleotide

SEQ ID NO: 884 - protein, 21 aa, Artificial Sequence
  Description of Artificial Sequence: Synthetic peptide
MEFGLSWLFLVAILKGVQCSR

SEQ ID NO: 885 - DNA, 321 bp, Artificial Sequence; identical to SEQ ID NO: 144
  Description of Artificial Sequence: Synthetic polynucleotide

SEQ ID NO: 886 - protein, 107 aa, Artificial Sequence; identical to SEQ ID NO: 145
  Description of Artificial Sequence: Synthetic polypeptide

SEQ ID NO: 887 - DNA, 24 bp, Artificial Sequence
  Description of Artificial Sequence: Synthetic oligonucleotide
ggcggaggaagcggaggtgggggc

SEQ ID NO: 888 - protein, 8 aa, Artificial Sequence
  Description of Artificial Sequence: Synthetic peptide
GGGSGGGG

SEQ ID NO: 889 - DNA, 360 bp, Artificial Sequence; identical to SEQ ID NO: 148
  Description of Artificial Sequence: Synthetic polynucleotide

SEQ ID NO: 890 - protein, 120 aa, Artificial Sequence; identical to SEQ ID NO: 149
  Description of Artificial Sequence: Synthetic polypeptide

SEQ ID NO: 891 - DNA, 6 bp, Artificial Sequence
  Description of Artificial Sequence: Synthetic oligonucleotide
ggatcc

SEQ ID NO: 892 - protein, 2 aa, Artificial Sequence
  Description of Artificial Sequence: Synthetic peptide
GS

SEQ ID NO: 893 - DNA, 48 bp, Artificial Sequence; identical to SEQ ID NO: 152
  Description of Artificial Sequence: Synthetic oligonucleotide

SEQ ID NO: 894 - protein, 16 aa, Artificial Sequence
  Description of Artificial Sequence: Synthetic peptide
ELPTQGTFSNVSTNVS

SEQ ID NO: 895 - DNA, 126 bp, Artificial Sequence; identical to SEQ ID NO: 154
  Description of Artificial Sequence: Synthetic polynucleotide

SEQ ID NO: 896 - protein, 42 aa, Artificial Sequence; identical to SEQ ID NO: 155
  Description of Artificial Sequence: Synthetic polypeptide

SEQ ID NO: 897 - DNA, 111 bp, Artificial Sequence; identical to SEQ ID NO: 156
  Description of Artificial Sequence: Synthetic polynucleotide

SEQ ID NO: 898 - protein, 37 aa, Artificial Sequence; identical to SEQ ID NO: 157
  Description of Artificial Sequence: Synthetic polypeptide

SEQ ID NO: 899 - DNA, 6 bp, Artificial Sequence
  Description of Artificial Sequence: Synthetic oligonucleotide
gtcgac

SEQ ID NO: 900 - protein, 2 aa, Artificial Sequence
  Description of Artificial Sequence: Synthetic peptide
VD

SEQ ID NO: 901 - DNA, 335 bp, Artificial Sequence; identical to SEQ ID NO: 725
  Description of Artificial Sequence: Synthetic polynucleotide

SEQ ID NO: 902 - protein, 111 aa, Artificial Sequence; identical to SEQ ID NO: 726
  Description of Artificial Sequence: Synthetic polypeptide

SEQ ID NO: 903 - DNA, 9 bp, Artificial Sequence
  Description of Artificial Sequence: Synthetic oligonucleotide
atgctcgag

SEQ ID NO: 904 - protein, 3 aa, Artificial Sequence
  Description of Artificial Sequence: Synthetic peptide
MLE

SEQ ID NO: 905 - DNA, 261 bp, Artificial Sequence; identical to SEQ ID NO: 531
  Description of Artificial Sequence: Synthetic polynucleotide

SEQ ID NO: 906 - protein, 107 aa, Artificial Sequence; identical to SEQ ID NO: 532
  Description of Artificial Sequence: Synthetic polypeptide

SEQ ID NO: 907 - DNA, 24 bp, Artificial Sequence
  Description of Artificial Sequence: Synthetic oligonucleotide
tcaggcggtggctcaggtgtcgag

SEQ ID NO: 908 - protein, 8 aa, Artificial Sequence
  Description of Artificial Sequence: Synthetic peptide
SGGGSGVD

SEQ ID NO: 909 - DNA, 864 bp, Artificial Sequence; identical to SEQ ID NO: 44
  Description of Artificial Sequence: Synthetic polynucleotide

SEQ ID NO: 910 - protein, 287 aa, Artificial Sequence; identical to SEQ ID NO: 536
  Description of Artificial Sequence: Synthetic polypeptide

SEQ ID NO: 911 - DNA, 57 bp, Artificial Sequence; identical to SEQ ID NO: 527
  Description of Artificial Sequence: Synthetic oligonucleotide

SEQ ID NO: 912 - protein, 18 aa, Artificial Sequence
  Description of Artificial Sequence: Synthetic peptide
EGRGSLLTCGDVEENPGP

SEQ ID NO: 913 - DNA, 9 bp, Artificial Sequence
  Description of Artificial Sequence: Synthetic oligonucleotide
atgctcgag

SEQ ID NO: 914 - protein, 3 aa, Artificial Sequence
  Description of Artificial Sequence: Synthetic peptide
MLE

SEQ ID NO: 915 - DNA, 321 bp, Artificial Sequence; identical to SEQ ID NO: 761
  Description of Artificial Sequence: Synthetic polynucleotide

SEQ ID NO: 916 - protein, 106 aa, Artificial Sequence; identical to SEQ ID NO: 520
  Description of Artificial Sequence: Synthetic polypeptide

SEQ ID NO: 917 - DNA, 24 bp, Artificial Sequence
  Description of Artificial Sequence: Synthetic oligonucleotide
tcaggcggtggctcaggtgtcgag

SEQ ID NO: 918 - protein, 8 aa, Artificial Sequence
  Description of Artificial Sequence: Synthetic peptide
SGGGSGVD

SEQ ID NO: 919 - DNA, 864 bp, Artificial Sequence; identical to SEQ ID NO: 44
  Description of Artificial Sequence: Synthetic polynucleotide

SEQ ID NO: 920 - protein, 287 aa, Artificial Sequence; identical to SEQ ID NO: 536
  Description of Artificial Sequence: Synthetic polypeptide

SEQ ID NO: 921 - DNA, 57 bp, Artificial Sequence; identical to SEQ ID NO: 527
  Description of Artificial Sequence: Synthetic oligonucleotide

SEQ ID NO: 922 - protein, 18 aa, Artificial Sequence
  Description of Artificial Sequence: Synthetic peptide
EGRGSLLTCGDVEENPGP

SEQ ID NO: 923 - DNA, 6 bp, Artificial Sequence
  Description of Artificial Sequence: Synthetic oligonucleotide
gccacc

SEQ ID NO: 924 - protein, 5 aa, Artificial Sequence
  Description of Artificial Sequence: Synthetic peptide
SGGGS
